(19) United States
(12) Patent Application Publication
(10) Pub. No.: US 2009/0176219 A1
(43) Pub. Date: Jul. 9, 2009

(54) DNA BINDING SITE OF A TRANSCRIPTIONAL ACTIVATOR USEFUL IN GENE EXPRESSION

(76) Inventors: Lucie Parenicova, Den Haag (NL); Noël Nicolaas Maria Elisabeth Van Peij, Delft (NL)

Correspondence Address: NIXON & VANDERHYE, PC, 901 NORTH GLEBE ROAD, 11TH FLOOR, ARLINGTON, VA, 22203, US

(21) Appl. No.: 12/094,934

(22) PCT Filed: Oct. 24, 2006
(86) PCT No.: PCT/EP2006/067734

§ 371 Date: May 23, 2008

(30) Foreign Application Priority Data
Nov. 29, 2005 (EP) 05111442.9

(51) Int. Cl. C12Q 1/68; C07H 21/04; C12N 15/63; C12N 1/15; C12N 9/48; C12N 15/80; C12P 21/00

(52) U.S. Cl. 435/6; 536/23.1; 435/320.1; 435/254.11; 435/212; 435/471; 435/69.1

(57) ABSTRACT

We have discovered DNA binding sites which are specifically recognized by PrtT, a transcriptional activator for protease genes. The DNA binding site can be defined structurally by a consensus nucleotide sequence and functionally by PrtT's ability to regulate transcriptional activation through that sequence. Both PrtT and its cognate DNA binding site (i.e., the nucleotide sequence in each promoter that is recognized by PrtT) can be used in a gene expression system. Possession of only a PrtT transcriptional activator is insufficient, its cognate DNA binding site is necessary for recognition by PrtT (i.e., binding to the site and activating transcription under appropriate conditions). A functional site, such as one obtained from a wild-type fungal gene, will confer PrtT-dependent transcriptional activation on 3′-downstream sequences. A mutation of a wild-type promoter that results in a non-functional site will abolish PrtT-dependent transcriptional activation of 3′-downstream sequences. A mutation of a wild-type promoter that results in a more functional site will enhance PrtT-dependent transcriptional activation of 3′-downstream sequences.

### FIELD OF THE INVENTION

[0001] The present invention relates to polynucleotides having a functional, a mutated, non-functional and/or a mutated, enhanced DNA binding site which is specifically recognized by PrtT, a transcriptional activator for protease genes, and their use in regulating gene expression.

### BACKGROUND OF THE INVENTION

[0002] Fungal transcriptional activators named PrtT have been recently described in WO 00/20596, WO 01/68864 and WO 06/040312. These transcriptional activators were isolated from Aspergillus niger (A. niger) and Aspergillus oryzae (A. oryzae). They globally activate transcription from the 5′-upstream promoters of fungal protease genes. Until recently, modulation of PrtT activated transcription was only possible on a global level by altering the transcriptional activator itself.

[0003] We now present conserved DNA binding sites in promoters of protease genes that are necessary and sufficient to confer PrtT-dependent transcriptional activation on a downstream nucleotide sequence.

[0004] The present invention provides a novel DNA binding site located in a promoter region and recognized by PrtT transcriptional activators, which has improved properties for regulating transcription of genes in fungi as compared to sequences that have been previously described. Other advantages and improvements are described below or would be apparent from the disclosure herein.

### SUMMARY OF THE INVENTION

[0005] It is an object of the invention to control, by genetic engineering, PrtT responsiveness, enhanced responsiveness or non-responsiveness of a native fungal gene or other heterologous nucleotide sequence through recognition or non-recognition of the promoter's functional or mutated DNA binding site in fungal cells.

[0006] In a first aspect of the invention, polynucleotides are provided that comprise one or more DNA binding sites, wherein at least one site is recognized by PrtT and confers PrtT-dependent transcriptional activation.

[0007] In a second aspect of the invention, polynucleotides are provided that comprise one or more mutated, non-functional DNA binding sites, wherein at least one site is not recognized by PrtT and/or does not confer PrtT-dependent transcriptional activation.

[0008] In a third aspect of the invention, polynucleotides are provided that comprise one or more mutated, enhanced DNA binding sites, wherein at least one site is recognized by PrtT and confers enhanced PrtT-dependent transcriptional activation.

[0009] In a fourth aspect of the invention, expression vectors comprising at least one of either of the aforementioned non-mutated and/or mutated, enhanced DNA binding sites are provided. The vector may further comprise a downstream nucleotide sequence which is transcribed by the promoter which contains a functional or functional, enhanced DNA binding site and is activated by PrtT. In addition, cells comprising an aforementioned DNA binding site (e.g. non-mutated, mutated, non-functional and mutated, enhanced) and/or an aforementioned vector are provided.

[0010] In a fifth aspect of the invention, cells in which at least one endogenous gene is mutated such that its promoter is no longer bound or transcriptionally activated by PrtT, or cells comprising the mutated, non-functional aforementioned polynucleotides or respective expression vector are provided. Such cells with at least reduced protease activity are also provided.

[0011] In a sixth aspect of the invention, processes for identifying protease genes are provided. One or more differentially expressed genes are detected between fungal cells either with or without a PrtT transcriptional activator (e.g., deleting prtT or otherwise inactivating PrtT). Those differentially expressed genes that encode proteases (e.g., as determined by sequence similarity to known proteases, proteolytic activity of the gene product, and possession of a DNA binding site for PrtT) are identified as protease genes controlled by PrtT. Novel proteases so identified and polynucleotides encoding them are also provided.

[0012] In a seventh aspect of the invention, processes for producing a cell with at least one mutated, non-functional DNA binding site in a promoter are provided. The mutation may be introduced into a host chromosome (i.e., an endogenous gene, preferably a protease gene) by mutagenesis or recombination techniques. Introduction of the mutation into the host genome may be confirmed by reduced binding of PrtT to the mutated DNA binding site or reduced PrtT-dependent transcriptional activation from the promoter. Inactivation of the endogenous promoters of at least 13 experimentally identified, more preferably all native protease genes by mutating a like number of DNA binding sites is preferred.

[0013] In an eighth aspect of the invention, processes for producing a polypeptide are provided. One or more polypeptides are expressed in a cell from an expression vector or an endogenous promoter of a native fungal gene. For protease-sensitive polypeptides, the cell is preferably reduced in protease activity. For polypeptides (such as many proteases) that are secreted out of the cell, they may be recovered from the nutrient medium. Otherwise, polypeptides are recovered from the cells (preferably a cell paste or pellet): (i) soluble polypeptides from a cell lysate and (ii) insoluble polypeptides or those inserted into or associated with cell membranes from a cell fraction.

[0014] Other processes for using and making the aforementioned polynucleotides, expression vectors, novel proteases and the polynucleotides encoding them, and cells are also provided. Further aspects of the invention will be apparent from the following description and claims, and generalizations thereto.

### BRIEF DESCRIPTION OF THE DRAWINGS AND TABLES

[0015] FIG. 1 shows the measurement of protease activity in culture supernatants. Results of the Anson assay (J. Gen. Physiol. 22:79-89, 1938) were determined using supernatant after 10 days fermentation in a shaker flask. Protease activity measurements in CBS 513.88 delta pepA transformants carrying constructs with differently modified pepA promoters (see Table 5) are shown in lanes 4 to 9. The lanes 2 and 3 correspond to transformants carrying the wild type 1.0 kb pepA promoter (containing the PrtT binding site) and the wild type 0.6 kb pepA promoter (without the PrtT binding site) constructs, respectively. The background was determined as the protease activity of non-transformed Aspergillus niger CBS 513.88 delta pepA (lane 1). Each bar represents a mean value of protease activity of two independent transformants.

[0016] FIG. 2 shows a physical plasmid map of vector 1, which illustrates recognition sites for restriction enzymes, the locations of genes, and their orientation. It is used for recloning AscI/XhoI ppepA-pepA constructs.

[0017] FIG. 3 shows a physical plasmid map of the expression vector pGBFIN-23, which illustrates recognition sites for restriction enzymes, the locations of genes, and their orientation. Indicated are the glaA flanking regions relative to the glaA promoter and the HindIII-XhoI cloning site. The E. coli DNA can be removed by digestion with restriction enzyme NotI prior to transformation of an A. niger strain.

[0018] FIG. 4 shows a physical plasmid map of the replacement vector pGBDEL, which illustrates recognition sites for restriction enzymes, the locations of genes, and their orientation. Indicated are the multiple cloning sites for cloning the flanking regions relative to the amdS marker.

[0019] FIG. 5 shows a physical plasmid map of the replacement vector pGBDEL-PRT2, which illustrates recognition sites for restriction enzymes, the locations of genes, and their orientation. Indicated are the 5′ prtT flanking region and the 3′ prtT flanking regions relative to the amdS marker. The sequences of the 3′ prtT flanking regions overlap by at least a few hundred basepairs. E. coli DNA was removed by digestion with restriction enzymes BstBI and XmaI, and subsequent recircularization prior to transformation of an A. niger strain.

[0020] FIG. 6 illustrates a procedure for deletion of the chromosomal prtT gene. A linear DNA construct of pGBDEL-PRT2 comprising the amdS selection marker flanked by homologous regions (5′ and 3′) of the prtT gene (1), integrates through double-crossover homologous recombination (X) in the genome at the prtT genetic locus (2), and replaces the chromosomal prtT gene (3). Subsequently, recombination between the direct repeats (3′, 3′ region) removes the amdS marker and results in precise excision of the prtT gene (4).

### DETAILED DESCRIPTION OF THE INVENTION

[0021] The DNA binding site can be defined structurally by a consensus nucleotide sequence and functionally by PrtT's ability to regulate transcriptional activation through that sequence. The DNA binding site was identified as a conserved nucleotide sequence (SEQ ID NO: 22 is the extended sequence) in endogenous promoters of native fungal protease genes. Both PrtT and its cognate DNA binding site (i.e., the nucleotide sequence in each promoter that is recognized by PrtT and confers to the gene ability to be transcriptionally controlled by PrtT) can be used in a gene expression system either (i) to improve a method for producing polypeptides in a PrtT-containing cell or (ii) to improve a method for producing a protease-sensitive polypeptide in a PrtT-containing cell. Possession of only a PrtT transcriptional activator is insufficient, because locating its cognate DNA binding site in the promoter is necessary for recognition by PrtT (i.e., binding to the site and activating transcription from the promoter under appropriate conditions). A functional site, such as one obtained from a wild-type fungal protease gene, will confer PrtT-dependent transcriptional activation on 3′-downstream sequences. Conversely, mutation of a wild-type promoter that results in a non-functional site will abolish PrtT-dependent transcriptional activation of 3′-downstream sequences. In the sequence listing of the present invention SEQ ID NO: 22 depicts the PrtT DNA binding site as [snnnnnccgw cggnnnnnnn nnnnnnnnnn nns]. For clarity reasons, in the description of the present invention SEQ ID NO: 22 will be depicted as 5′-G/C(N)₅ C C G A/T C G G (N)₁₉ G/C-3′, i.e. G/C for S, and A/T for W.

[0022] In an embodiment of the present invention, a polynucleotide is provided that comprises one or more double-stranded DNA binding sites. At least 32 bases of a first strand of a site are identical in sequence to 5′-G/C(N)₅ C C G A/T C G G (N)₁₉ G/C-3′ (SEQ ID NO:22). Since 24 bases in the extended DNA binding site may be degenerate, there can be changes in the sequence at only nine positions to alter binding affinity of PrtT and/or to alter PrtT activated transcription of a downstream nucleotide sequence. A second strand of the site is complementary to the first strand. The site is specifically bound by a PrtT transcriptional activator under binding conditions and such binding will activate transcription of a downstream nucleotide sequence. The asymmetry of the extended sequence above or the shorter 5′-C C G A/T C G G-3′ is helpful in defining the direction of transcription as being in the 5′ 3′ direction. It is preferred that a functional DNA binding site conserve the imperfect palindromic sequence of seven contiguous bases. The double-stranded DNA binding site may be obtained from a eukaryote (e.g., fungus).

[0023] In another embodiment of the present invention, a polynucleotide is provided comprising one or more double-stranded mutated, non-functional DNA binding sites. A double-stranded DNA binding site (e.g., at least 32 bases of a first strand of the non-mutated site are identical in sequence to 5′-G/C(N)₅ C C G A/T C G G (N)₁₉ G/C-3′, SEQ ID NO:22) is obtained from a eukaryote (e.g., fungus), wherein the non-mutated, functional site is specifically bound by a PrtT transcriptional activator under binding conditions and such binding will activate transcription of a downstream nucleotide sequence. But at least one (e.g., one, two, three, four, five, six, seven, eight, or nine) bases of a first strand of the mutated site are changed as compared to the sequence of the non-mutated site (e.g., by addition, deletion, transition, transversion, or any combination thereof of bases in the extended sequence) such that PrtT no longer specifically recognizes the mutated, non-functional site or that PrtT no longer activates transcription. Since 24 bases in the extended DNA binding site may be degenerate, there can be changes in the sequence at a maximum of nine positions to alter binding affinity of PrtT and/or to alter PrtT activated transcription of a downstream nucleotide sequence. A second strand of the mutated, non-functional site is complementary to the first strand. The non-mutated site was specifically bound by a PrtT transcriptional activator under binding conditions and such binding would have activated transcription downstream. It is preferred that a mutated, non-functional DNA binding site has one or more changes in the imperfect palindromic sequence of seven contiguous bases.

[0024] In yet another embodiment of the present invention, a polynucleotide is provided that comprises one or more double-stranded mutated, enhanced DNA binding sites that demonstrate enhanced transcription of a downstream nucleotide sequence as compared to the non-mutated DNA binding site. A double-stranded DNA binding site (e.g., at least 32 bases of a first strand of the non-mutated site are identical in sequence to 5′-G/C(N)₅ C C G A/T C G G (N)₁₉ G/C-3′, SEQ ID NO:22) is obtained from a eukaryote (e.g., fungus), wherein the non-mutated and mutated, enhanced sites are specifically bound by a PrtT transcriptional activator under binding conditions and such binding will activate transcription of a downstream nucleotide sequence. But at least one (e.g., one, two, three, four, five, six, seven, eight, or nine) bases of a first strand of the mutated site are changed as compared to the sequence of the non-mutated site (e.g., by addition, deletion, transition, transversion, or any combination thereof of bases in the extended sequence) such that PrtT specifically recognizes the site and activates and enhances transcription of the downstream nucleotide sequence. Since 24 bases in the extended DNA binding site may be degenerate, there can be changes in the sequence at a maximum of nine positions to alter binding affinity of PrtT and/or to alter PrtT activated transcription of a downstream nucleotide sequence. A second strand of the mutated site is complementary to the first strand. The non-mutated and mutated, enhanced sites are specifically bound by a PrtT transcriptional activator under binding conditions and such binding would have activated transcription downstream. It is preferred that a mutated, enhanced DNA binding site has one or more changes in both the imperfect palindrome sequence of seven contiguous bases and in the extended sequence.

[0025] The term “enhanced transcription of a nucleotide sequence downstream of a mutated DNA binding site” in the context of the present invention is defined as at least 10% more, at least 20% more, at least 30% more, at least 40% more, at least 80% more, at least 100% more, at least 200% more, or at least 300% more transcription product than a corresponding nucleotide sequence downstream of a non-mutated DNA binding site when expressed under the same conditions using the same assay. Assays to monitor the amount of expression product are known to the person skilled in the art. Examples of such assays to monitor the amount of expression product are: Northern Blot, Quantititive Polymerase Chain Reaction (PCR), Real Time PCR, Gene Array analysis.

[0026] A polynucleotide may be isolated from a eukaryotic source (e.g., fungus). For example, it may be cloned by screening a source library of recombinant sequences or amplifying a fragmentary sequence from source DNA. Thus, it may be purified to any desired degree from the eukaryote (e.g., at least 90% of solutes in a composition are the desired nucleic acid molecules). A promoter sequence from a non-fungal source that does not possess a PrtT transcriptional activator may fortuitously be identical to SEQ ID NO:22 or similar enough to be corrected to SEQ ID NO:22 and, therefore, regulated by PrtT in a cell. It may be recombinant if DNA which is not colinear in the genome are joined together to construct a recombinant polynucleotide. At least some parts of the polynucleotide are likely to have been obtained from sources other than the cell in which the polynucleotide is replicated.

[0027] In an expression vector, the base contacts, orientation, and spacing of the one or more DNA binding sites is typical for a zinc finger-containing transcription factor such as PrtT. The DNA binding site may be inserted into the expression vector for optimal or suboptimal transcriptional activation of a downstream nucleotide sequence (e.g., protease gene or other gene, either native or heterologous) located within 1200 bases, 800 bases, or between 100 and 1200 bases of the site of transcriptional initiation. The downstream nucleotide sequence (e.g. coding sequence) may be a non-protease gene, a non-fungal gene, or both. Other control sequences of the promoter may or may not be derived from a fungal gene.

[0028] Two different types of PrtT-expressing fungal cells may be engineered using the above embodiments of the invention. Fungal cells are engineered by inserting functional DNA binding sites into the chromosome or on an episome to confer PrtT-dependent transcriptional activation on a nucleotide sequence downstream of the site. This type of fungus will coordinately transcribe such sequences with protease genes. Alternatively, fungal cells are engineered by replacing chromosomal or episomal DNA binding sites with mutated, non-functional sites to abolish PrtT-responsiveness because a promoter comprising the mutated, non-functional site is no longer recognized by PrtT. Native protease genes may be inactivated in this manner; PrtT-dependent transcriptional activation of a nucleotide sequence downstream of a functional site may also be inactivated. This type of fungus is suitable for expressing native or heterologous polypeptides that are sensitive to protease degradation. Thus, the polynucleotide of the invention may be a recombination vector comprising a functional or non-functional DNA binding site flanked by homologous sequences of the target locus and a selectable marker to detect recombination, but does not require the presence of a downstream coding sequence for expression by the promoter. Preferably the homologous flanking sequences comprise at least 30 bases, more preferably at least 50 bases, more preferably at least 100 bases, at least 200 bases, more preferably at least 500 bases, even more preferably at least 1 kb, most preferably at least 2 kb of the target locus of the host cell. By rendering a PrtT binding site non-functional, specific proteases can be inactivated, depending on the protein of interest to be produced (e.g. inactivation of proline specific proteases when the protein of interest is rich in prolines, or inactivate carboxypeptidases when the protein of interest is sensitive to degradation by carboxypeptidases). In contrast, global inactivation of proteases by deletion of the PrtT gene has the disadvantage that those proteases necessary for intracellular processes and protein regulation will be inactivated as well, leading to an impaired expression host cell. Furthermore, other genes than proteases (e.g. genes encoding transporters) controlled by PrtT can be essential for the cell, and inactivation of PrtT may be lethal for those cells.

[0029] PrtT polypeptides are transcriptional activators of protease genes acting at DNA binding sites in their promoters. The term “transcriptional activator” as used herein refers to a polypeptide which has the ability to activate transcription from amongst others: a specific protease promoter or a set of protease promoters. PrtT is necessary for the initiation of transcription of the protease gene (or other heterologous nucleotide sequence) to which the promoter is operably linked.

[0030] The biological activity of a DNA binding site which is contained in a protease promoter may be determined by measuring the protease's activity (e.g., proteolysis) as described herein for determination of acidic endo-protease activity using bovine serum albumin (BSA) as the substrate. This method is also described by van den Hombergh et al. (Curr. Genet. 28:299-308, 1995). Other methods for measuring a protease's activity can be found in WO 02/068623. Alternatively, the biological activity of the DNA binding site can be determined by measuring the mRNA level of the protease transcripts. The mRNA levels can, for example, be quantitated by hybridization (e.g., Northern or slot blotting) or RT-PCR. A filter binding assay, protein crosslinking, and chromatin immunoprecipitation may be used to identify polypeptide binding to the DNA binding site.

[0031] A reporter gene under the control of a promoter comprising the DNA binding site can be used as a surrogate for the protease or its activity. Measuring the biological activity of β-galactosidase (lacZ) or green fluorescent protein (GFP) reporter has been described (Luo, Gene 163:127-131, 1995; Henriksen et al., Microbiol. 145:729-734, 1999). Alternatively, one or more specific protease reporter genes such as the pepstatin-sensitive extracellular aspartic protease encoding pepA gene can be used for measuring the activity of a DNA binding site. One or more sites regulate transcription of the reporter gene's promoter.

[0032] At least one mutation may be introduced in a DNA binding site by standard techniques, such as site-directed mutagenesis and PCR-mediated mutagenesis. Example of mutagenesis procedures are the QuickChange™ site-directed mutagenesis kit (Stratagene), the Altered Sitese II in vitro mutagenesis system (Promega), sequence overlap extension (SOE-PCR as described by Ho et al., Gene 77:51-59, 1989), or other PCR techniques (Griffin & Griffin, eds., Molecular Biology: Current Innovations and Future Trends, Horizon Scientific Press, Norfolk, UK). Random mutagenesis (e.g., chemical or radiation damage) or error-prone DNA replication (e.g., nucleotide misincorporation) may also be used to introduce mutations in the DNA binding site.

[0033] The DNA binding site of the present invention may be obtained from any filamentous fungus. “Filamentous fungi” include all filamentous forms of the subdivision Eumycota and Oomycota. The filamentous fungi are characterized by a mycelia wall composed of chitin, cellulose, glucan, chitosan, mannan, and other complex polysaccharides. Vegetative growth is by hyphal elongation and carbon catabolism is obligately aerobic. Filamentous fungal species include, but are not limited to, those of the genus Acremonium, Aspergillus, Aureobasidium, Cryptococcus, Filibasidium, Fusarium, Humicola, Magnaporthe, Mucor, Myceliophthora, Neocallimastix, Neurospora, Paecilomyces, Penicillium, Piromyces, Schizophyllum, Talaromyces, Thermoascus, Thielavia, Tolypocladium, and Trichoderma.

[0034] The DNA binding site may be obtained from a species of Aspergillus, such as A. awamori, A. nidulans, A. niger, A. oryzae, A. sojae, or A. fumigatus. Preferably, it is obtained from a strain of A. niger, A. oryzae, or A. fumigatus. Alternatively, it is obtained from a species of Penicillium, such as P. chrysogenum, or a species of Fusarium, such as F. oxysporum or F. venenatum.

[0035] It will be understood that for the aforementioned species, the invention encompasses both the perfect and imperfect states, and other taxonomic equivalents, e.g., anamorphs, regardless of the species name by which they are known. Those skilled in the art will readily recognize the identity of appropriate equivalents. For example, the polypeptides may be obtained from microorganisms, which are taxonomic equivalents of Aspergillus as defined by Raper & Fennel (The Genus Aspergillus, Wilkins Company, Baltimore Md., 1965) regardless of the species name by which they are known.

[0036] Aspergilli are mitosporic fungi characterized by an aspergillum comprising a conidiospore stipe with no known teleomorphic states terminating in a vesicle, which in turn bears one or two layers of synchronously formed specialized cells, variously referred to as sterigmata or phialides, and asexually formed spores referred to as conidia. Known teleomorphs of Aspergillus include Eurotium, Neosartorya, and Emericella. Strains of Aspergillus and teleomorphs thereof are readily accessible to the public in a number of culture collections.

[0037] DNA binding sites may be obtained from strains of filamentous fungus such as for example Aspergillus niger CBS 513.88, Aspergillus oryzae ATCC 20423, IFO 4177, ATCC 1011, ATCC 9576, ATCC14488-14491, ATCC 11601, ATCC12892, Aspergillus fumigatus AF293 (CBS101355), P. chrysogenum CBS 455.95, Penicillium citrinum ATCC 38065, Penicillium chrysogenum P2, Acremonium chrysogenum ATCC 36225 or ATCC 48272, Trichoderma reesei ATCC 26921 or ATCC 56765 or ATCC 26921, Aspergillus sojae ATCC11906, Chrysosporium lucknowense ATCC44006, and derivatives thereof.

[0038] Furthermore, DNA binding sites may be identified and obtained from other sources including microorganisms isolated from nature (e.g., soil, composts, water, etc.). Techniques for isolating microorganisms from the environment are known in the art. The nucleotide sequence may be derived with a labeled probe by screening a genomic library of another microorganism. Once a nucleotide sequence of at least one DNA binding site has been detected with the probe, the sequence may be isolated or cloned by utilizing known techniques (see, e.g., Sambrook & Russell, Molecular Cloning: A Laboratory Manual, 3rd Ed., CSHL Press, Cold Spring Harbor, N.Y., 2001; and Ausubel et al., Current Protocols in Molecular Biology, Wiley InterScience, NY, 1995).

[0039] Low- to medium- to high-stringency conditions means prehybridization and hybridization at 42° C. in 5×SSPE, 0.3% SDS, 200 pg/ml sheared and denatured salmon sperm DNA, and one of 25%, 35% or 50% formamide for low to medium to high stringencies, respectively. Subsequently, the hybridization reaction is washed three times for 30 min each using 2×SSC, 0.2% SDS and one of 55° C., 65° C. or 75° C. for low to medium to high stringencies, respectively. Oligonucleotide probes may be used. They are typically labeled for detecting corresponding DNA binding sites (e.g., with ³²P, ³³P, ³H, ³⁵S, biotin, avidin, or a fluorescent/luminescent marker). For example, molecules to which a ³²P-, ³³P-, ³H- or ³⁵S-labeled oligonucleotide probe hybridizes may be detected by use of X-ray film or Phospho-Image™ analysis.

[0040] A variant of the nucleotide sequence may also be a homologous or paralogous DNA binding site in a protease promoter. In the context of the invention, homologous or paralogous means nucleotide sequence identical or similar to 5′-C C G A/T C G G-3′ and obtained from A. niger, A. oryzae, A. fumigatus, P. chrysogenum, F. oxysporum, or F. venenatum. For example, Aspergillus strains can be screened for a homologous or paralogous DNA binding site in a protease promoter by hybridization. Upon detection of a homologous or paralogous nucleotide sequence according to the present invention, a genomic DNA library can be screened using a probe that hybridizes to 5′-C C G A/T C G G-3′ or more extended versions thereof, e.g. the extend versions as depicted Table 2 and 3.

[0041] The techniques used to isolate or clone a nucleotide sequence are known in the art and include direct isolation from genomic DNA. The cloning of a nucleotide sequence of the present invention from such genomic DNA can be accomplished by using known hybridization techniques.

[0042] “Polynucleotide” is defined herein as a double-stranded nucleic acid molecule, which is isolated from a naturally occurring gene or which has been modified to contain segments of nucleic acid which are combined and juxtaposed in a manner which would not otherwise exist in nature. “Expression vector” is defined as a double-stranded nucleic acid molecule, which contains control sequences required for expression of a coding sequence and maintenance (at least temporarily) in a cell. The term “coding sequence” as defined herein is a sequence, which is transcribed into mRNA and translated into a polypeptide. The boundaries of the coding sequence are generally determined by the ATG start codon at the 5′ end of the mRNA and a translation stop codon sequence terminating the open reading frame at the 3′ end of the mRNA. A coding sequence can include, but is not limited to, DNA, cDNA, and recombinant nucleotide sequences. Expression will be understood to include any step involved in the production of the polypeptide including, but not limited to, transcription, splicing, posttranscriptional modification, translation, posttranslational modification, secretion, and proteolytic processing.

[0043] The term “control sequences” is defined herein to include all components, which are necessary or advantageous for the expression of a polypeptide. Each control sequence may be native or foreign to the nucleotide sequence encoding the polypeptide. Such control sequences include, but are not limited to, a leader, optimal translation initiation sequences (as described in Kozak, J. Biol. Chem. 266:19867-19870, 1991), polyadenylation sequence, propeptide sequence, prepropeptide sequence, promoter, signal sequence, and transcription terminator. At a minimum, the control sequences include a promoter, and transcriptional and translational stop signals.

[0044] Manipulation of the nucleotide sequence encoding a polypeptide prior to its insertion into an expression vector may be desirable or necessary depending on the vector. The techniques for modifying nucleotide sequences utilizing cloning methods are known in the art. The control sequences may be provided with linkers for the purpose of introducing specific restriction sites facilitating ligation of the control sequences with the coding region of the nucleotide sequence encoding a polypeptide. The term “operably linked” is defined herein as a configuration in which a control sequence is appropriately placed at a position relative to the coding sequence such that the control sequence directs expression of a polypeptide or transcription of other downstream sequences.

[0045] The control sequence may be a promoter, which is recognized by the cellular machinery for expression of a downstream nucleotide sequence. The promoter contains transcriptional control sequences (e.g., one or more DNA binding sites of the present invention) that regulate the expression of the polypeptide or transcription of other downstream sequences. The promoter may be any nucleotide sequence, which shows transcriptional activity in the cell including mutant, truncated, and hybrid promoters, and may be obtained from genes encoding extracellular or intracellular polypeptides either native or heterologous to the cell.

[0046] The control sequence may also be a suitable transcription terminator sequence, a nucleotide sequence recognized by the cellular machinery to terminate transcription. The terminator sequence is operably linked to the 3′ terminus of the nucleotide sequence encoding the polypeptide. Any terminator, which is functional in the cell, may be used in the present invention. Preferred terminators for filamentous fungal cells are obtained from the genes encoding A. oryzae TAKA amylase, A. niger glucoamylase (glaA), A. nidulans anthranilate synthase, A. niger alpha-glucosidase, trpC gene, and Fusarium oxysporum trypsin-like protease.

[0047] The control sequence may also be a suitable leader sequence, a non-translated region of a mRNA which is important for translation by the cell. The leader sequence is operably linked to the 5′ terminus of the nucleotide sequence encoding the polypeptide. Any leader sequence, which is functional in the cell, may be used in the present invention. Preferred leaders for filamentous fungal cells are obtained from the genes encoding A. oryzae TAKA amylase and A. nidulans triose phosphate isomerase and A. niger glaA. Other control sequences may be isolated from the Penicillium IPNS gene, or pcbC gene, the beta tubulin gene. All of the control sequences cited in WO 01/21779 are herewith incorporated by reference.

[0048] The control sequence may also be a polyadenylation sequence, a sequence which is operably linked to the 3′ terminus of the nucleotide sequence and which, when transcribed, is recognized by the filamentous fungal cell as a signal to add polyadenosine residues to transcribed mRNA. Any polyadenylation sequence, which is functional in the cell, may be used in the present invention. Preferred polyadenylation sequences for filamentous fungal cells are obtained from the genes encoding A. oryzae TAKA amylase, A. niger glucoamylase, A. nidulans anthranilate synthase, Fusarium oxysporum trypsin-like protease, and A. niger alpha-glucosidase.

### Expression Vectors

[0049] Yet another embodiment of the present invention are expression vectors comprising a DNA binding site within the promoter, a downstream transcribed sequence, a transcriptional stop signal, a translational stop signal, and other control sequences for maintenance of the vector in a cell produced by recombinant technology. The various nucleotide and control sequences described above may be joined together to produce a recombinant expression vector which may include one or more convenient restriction sites to allow for insertion or substitution of the nucleotide sequence encoding the polypeptide at such sites.

[0050] A nucleotide sequence encoding a desired polypeptide may be expressed by inserting the nucleotide sequence or a polynucleotide comprising the nucleotide sequence into an appropriate vector for expression. In creating the expression vector, the coding sequence is located in the vector so that the coding sequence is operably linked with the appropriate control sequences (e.g., one or more DNA binding sites) for expression, and possibly secretion.

[0051] The expression vector may be any vector (e.g., a plasmid or virus), which can be conveniently engineered by recombinant technology and can bring about the expression of the nucleotide sequence encoding a desired polypeptide. The choice of the vector will typically depend on the compatibility of the vector with the cell (e.g., filamentous fungus) into which the vector is to be introduced. The vectors may be linear or a closed circle (i.e., episome). The vector may be an autonomously replicating vector, i.e., a vector, which exists as an extrachromosomal entity, the replication of which is independent of chromosomal replication, e.g., plasmid, extrachromosomal element, minichromosome, or artificial chromosome. An autonomously maintained cloning vector may comprise the AMA1-sequence (see, e.g., Aleksenko & Clutterbuck, Fungal Genet. Biol. 21:373-397, 1997). Positive and negative selectable markers in the vector may be used for genetic engineering. Maintenance functions and an origin of replication are essential for episomes. Engineered chromosomes may require a centromere, telomeres, and origins of replication for maintenance and segregation.

[0052] Alternatively, the vector may be one which, when introduced into the cell (e.g., a filamentous fungus), is integrated into the genome and replicated together with the chromosome into which it has been integrated. The integrative cloning vector may integrate at random or at a predetermined target locus in the chromosome of the cell. In an embodiment of the present invention, the integrative cloning vector comprises a fragmentary region, which is homologous to a nucleotide sequence at a predetermined target locus in the genome of the cell for targeting integration of the cloning vector at the locus. In order to promote targeted integration, the cloning vector is preferably linearized prior to transformation of the cell. Linearization is preferably performed such that at least one but preferably either end of the cloning vector is flanked by sequences homologous to the target locus to allow integration by homologous recombination. The skilled person will know the optimal length of a flanking sequence for a specific host cell to allow integration by homologous recombination. The length of the homologous sequences flanking the target locus is preferably at least 30 bp, preferably at least 50 bp, preferably at least 0.1 kb, even preferably at least 0.2 kb, more preferably at least 0.5 kb, even more preferably at least 1 kb, most preferably at least 2 kb. Preferably, the efficiency of targeted integration into the genome of the host cell, i.e. integration in a predetermined target locus, is increased by augmented homologous recombination abilities of the host cell. Such phenotype of the cell preferably involves a deficient ku70 gene as described in WO2005/095624. WO2005/095624, which is herein enclosed by reference, discloses a preferred method to obtain a filamentous fungal cell comprising increased efficiency of targeted integration. Preferably, a DNA sequence in the cloning vector, which is homologous to the target locus is derived from a highly expressed locus meaning that it is derived from a gene, which is capable of high expression level in the filamentous fungal host cell. A gene capable of high expression level, i.e. a highly expressed gene, is herein defined as a gene whose mRNA can make up at least 0.5% (w/w) of the total cellular mRNA, e.g. under induced conditions, or alternatively, a gene whose gene product can make up at least 1% (w/w) of the total cellular protein, or, in case of a secreted gene product, can be secreted to a level of at least 0.1 g/l (as described in EP 357127). A number of preferred highly expressed fungal genes are given by way of example: the amylase, glucoamylase, alcohol dehydrogenase, xylanase, glyceraldehyde-phosphate dehydrogenase or cellobiohydrolase (cbh) genes from Aspergilli or Trichoderma. Most preferred highly expressed genes for these purposes are a glucoamylase gene, preferably an A. niger glucoamylase gene, an A. oryzae TAKA-amylase gene, an A. nidulans gpdA gene, a Trichoderma reesei cbh gene, preferably cbh1. They may be fungal genes regulated by the DNA binding sites of the present invention. More than one copy of a nucleotide sequence encoding a polypeptide may be inserted into the cell to increase production of the gene product. This can be done, preferably by integrating into the cell's chromosome of the nucleotide sequence, more preferably by targeting the integration of the nucleotide sequence at one of the highly expressed loci listed immediately above. Integration may be enhanced by a recombinase. Alternatively, this can be done by including an amplifiable selectable marker gene with the nucleotide sequence where cells containing amplified copies of the selectable marker gene, and thereby additional copies of the nucleotide sequence, can be selected for by cultivating the cells in the presence of the appropriate selectable agent. To increase even more the number of copies of the DNA sequence to be over expressed, the technique of gene conversion as described in WO 98/46772 may be used.

[0053] The vectors preferably contain one or more selectable markers, which permit easy selection of transformed cells. A selectable marker is a gene the product of which provides for biocide or viral resistance, resistance to heavy metals, prototrophy to auxotrophs, and the like. A selectable marker for use in a filamentous fungal cell may be selected from the group including, but not limited to, amdS (acetamidase), argB (ornithine carbamoyltransferase), bar (phosphinothricinacetyltransferase), bleA (phleomycin binding), hygB (hygromycinphosphotransferase), niaD (nitrate reductase), pyrG (orotidine-5′-phosphate decarboxylase), sC (sulfate adenyltransferase), and trpC (anthranilate synthase), as well as equivalents from other species. Preferred for use in an Aspergillus and Penicillium cell are the amds (EP 635574, WO 97/06261) and pyrG genes of A. nidulans or A. oryzae and the bar gene of Streptomyces hygroscopicus. More preferably an amdS gene is used, even more preferably an amdS gene from A. nidulans or A. niger. A most preferred selection marker gene is the A. nidulans amdS coding sequence fused to the A. nidulans gpdA promoter as disclosed in EP 635574, which is herein enclosed by reference. AmdS genes from other fungi may also be used, e.g. the ones disclosed in WO 97/06261.

[0054] The procedures used to join the above-described elements to construct an expression vector of the present invention are well-known in the art (e.g., Sambrook & Russell, Molecular Cloning: A Laboratory Manual, 3rd Ed., CSHL Press, 2001; Ausubel et al., Current Protocols in Molecular Biology, Wiley InterScience, 1995).

### Host Cells and Other Engineered Cells

[0055] DNA binding sites of the present invention are preferably used for engineering one of two types of cells:

(i) a first type of cell that would be highly suited for producing a desired polypeptide, the desired polypeptide being under the control of one or more DNA binding sites and
(ii) a second type of cell that would be highly suited for producing a desired polypeptide, the desired polypeptide being sensitive to protease degradation. In this type of cell, at least one DNA binding site in the host cell's genome is mutated in accordance with the second aspect of the invention such that PrtT no longer specifically recognizes the mutated, non-functional site or that PrtT no longer activates transcription.

[0056] Optionally, both types of cells additionally comprise a polynucleotide or an expression vector comprising at least one functional or mutated (i.e., non-functional, or enhanced) DNA binding site, which is operably linked upstream of a transcribed nucleotide sequence (e.g., encoding a polypeptide sensitive to protease degradation, a polypeptide under the control of a PrtT transcriptional activator, the PrtT transcriptional activator itself, or another polypeptide to be produced).

[0057] Optionally, the host cell comprises an elevated unfolded protein response (UPR) to enhance production abilities of a polypeptide of interest. UPR may be increased by techniques described in US 2004/0186070 and/or US 2001/0034045 and/or WO 01/72783. More specifically, the protein level of HAC1 and/or IRE1 and/or PTC2 has been modulated in order to obtain a host cell having an elevated UPR. Alternatively, or in combination with an elevated UPR and/or a phenotype displaying lower protease expression and/or protease secretion, the host cell displays an oxalate deficient phenotype in order to enhance the yield of production of a polypeptide of interest. An oxalate deficient phenotype may be obtained by techniques described in WO2004/070022A2.

[0058] Alternatively, or in combination with an elevated UPR and/or oxalate deficiency, the host cell displays a combination of phenotypic differences compared to the wild cell to enhance the yield of production of the polypeptide of interest. These differences may include, but are not limited to, lowered expression of glucoamylase and/or neutral alpha-amylase A and/or neutral alpha-amylase B, protease, and oxalic acid hydrolase. Said phenotypic differences displayed by the host cell may be obtained by genetic modification according to the techniques described in US2004/0191864A1.

[0059] The choice of a host cell will to a large extent depend upon the source of the nucleotide sequence encoding the desired polypeptide to be produced. Preferably, the host cell is a filamentous fungal cell as defined earlier in the description as a source where the DNA binding site may be obtained from. The host cell may also be a host cell as disclosed in WO 01/68864 or WO 00/20596. The introduction of an expression vector or other polynucleotide into a filamentous fungal cell may involve a process consisting of protoplast formation, transformation of the protoplasts, and regeneration of the cell wall in a known manner. Suitable procedures for transformation of Aspergillus cells are described in EP 238023 and Yelton et al. (Proc. Natl. Acad. Sci. USA 81:1470-1474, 1984). A suitable method of transforming Fusarium species is described by Malardier et al. (Gene 78:147-156, 1989) or in WO 96/00787. The expression vector or nucleic acid construct that can be used were already described under the corresponding sections.

### Production of a Polypeptide Sensitive to Protease Degradation

[0060] According to another embodiment, the present invention relates to a host cell with a reduced protease phenotype, which cell is a mutant of a parent cell useful for the production of a polypeptide sensitive to protease degradation, in which the parent cell comprises one or more nucleotide sequences encoding proteases, the transcription of which is activated by a PrtT transcriptional activator, and the mutant cell transcribes fewer protease genes than the parent cell when cultured under the same conditions because the protease promoters comprise one or more mutated, non-functional PrtT binding sites.

[0061] A preferred method for measurement of protease activity in a host cell is described in the example section herein for determination of the acidic endo-protease activity using bovine serum albumin (BSA) as substrate. A detailed description of this method is also described by van den Hombergh et al. (Curr. Genet. 28:299-308, 1995). Measurement of protease(s) also may be assayed using other known methods. In one such method, an aliquot of a 48 hr culture media is incubated with ³H-labeled sperm whale myoglobin at pH 4.0 and the radioactivity in the TCA-soluble fraction is measured (van Noort et al., Anal. Biochem. 198:385-390, 1991). Other methods have been described for identifying, e.g., aspartic proteinase A of A. niger (Takahashi, Meth. Enzymol. 248:146-155, 1991), endopeptidases (Morihara, Meth. Enzymol. 248:242-253, 1995), carboxypeptidases (Reminton & Breddam, Meth. Enzymol. 244:231-248, 1994), dipeptidyl peptidase (Ikehara et al., Meth. Enzymol. 244:215-227, 1994), and aminopeptidases (Little et al., Meth. Enzymol. 45:495-503, 1976). Alternatively other protease assays may be used such as the one described in WO 02/068623. Alternatively, the assay used may be Northern blotting, the use of a reporter gene under the control of a protease promoter, or a western blotting or a DNA array analysis (Eisen & Brown, Meth. Enzymol. 303:179-205, 1999) as also described herein.

[0062] A mutant cell may produce fewer proteases and less protease activity than the parental cell that is used as a reference when measured by any one of the given assays. A mutant A. niger may produce fewer proteases and less protease activity than the deposited A. niger CBS 513.88. A mutant A. oryzae may produce fewer proteases and less protease activity than the deposited A. oryzae. A mutant P. chrysogenum may produce fewer proteases and less protease activity than the deposited P. chrysogenum CBS 455.95. A mutant A. fumigatus may produce fewer proteases and less protease activity than A. fumigatus AF293 (CBS101355).

[0063] A mutant cell may be obtained by genetic engineering using recombinant genetic manipulation techniques, submitting the filamentous fungus to mutagenesis, or both. Using genetic manipulation techniques, it is preferred to obtain a recombinant fungus: preferably by deleting a DNA binding site recognized by a PrtT transcriptional activator, more preferably the deleted DNA binding site is replaced by a non-functional variant thereof, and most preferably the deletion and replacement are made as described in EP 357127.

[0064] The mutant cell may be obtained by modification or inactivation of a DNA binding site recognized by a PrtT transcriptional activator present in the cell and necessary for expression of a downstream sequence. Expression of proteases in the mutant cell may thereby be reduced or eliminated.

[0065] Modification or inactivation of the DNA binding site of the present invention may result from subjecting the parent cell to mutagenesis and selecting for mutant cells in which the ability to express proteases has been reduced by comparison to the parental cell. The mutagenesis, which may be specific or random, may be performed, for example, by use of a suitable physical or chemical mutagenizing agent, by use of a suitable oligonucleotide, or by subjecting the DNA sequence to PCR-generated mutagenesis. Furthermore, the mutagenesis may be performed by use of any combination of these mutagenizing agents.

[0066] Examples of a physical or chemical mutagenizing agent suitable for the present purpose include gamma or ultraviolet (UV) radiation, hydroxylamine, N-methyl-N′-nitro-N-nitrosoguanidine (MNNG), O-methyl hydroxylamine, nitrous acid, ethyl methane sulphonate (EMS), sodium bisulphite, formic acid, and nucleotide analogs. When such agents are used, the mutagenesis is typically performed by incubating the parent cell to be mutagenized in the presence of the mutagenizing agent of choice under suitable conditions, and selecting for mutant cells exhibiting reduced expression of the gene.

[0067] The filamentous fungus obtained may be subsequently selected by monitoring the expression level of the desired polypeptide and/or any protease known to be under control of the PrtT transcriptional activation. Optionally, the filamentous fungus is subsequently selected by measuring the expression level of a given gene of interest to be expressed in the host cell.

[0068] The mutant cell, which has been modified or inactivated by any of the methods described above and produces fewer proteases and less protease activity than the parent cell when cultured under identical conditions as measured using the same assays as defined before, may harbor another nucleotide sequence. The mutant cell produces preferably at least 25% less, more preferably at least 50% less, even more preferably at least 75% less, and most preferably at least 95% less protease activity than the parent cell when cultured under identical conditions using the same assays as defined before. The filamentous fungus Aspergillus niger, Aspergillus oryzae, Aspergillus fumigatus, Penicillium chrysogenum, F. oxysporum, or F. venenatum mutant cell may produce fewer proteases and less protease activity than the corresponding deposited filamentous fungus cited earlier when cultured under identical conditions using the same assays as defined before.

[0069] According to an embodiment of the invention, polypeptides are consequently produced in a host cell of the present invention with a reduced protease phenotype, which cell is a mutant of a parent cell useful for the production of a polypeptide sensitive to protease degradation, in which the parent cell comprises one or more nucleotide sequences encoding proteases, the transcription of which is activated by a PrtT transcriptional activator, and the mutant cell transcribes fewer protease genes than the parent cell when cultured under the same conditions because the protease promoters comprise one or more mutated, non-functional DNA binding sites.

[0070] According to a preferred embodiment of the invention, a polypeptide is produced by a method comprising:
[0071] (a) cultivating the host cell with reduced protease phenotype in a nutrient medium, under conditions conducive to expression of the polypeptide
[0072] (b) expressing the polypeptide in said host cell, and
[0073] (c) optionally recovering the polypeptide from the nutrient medium or from the host cell.

[0074] According to another preferred embodiment of the invention, a polypeptide is produced by a method comprising:
[0075] (a) transforming the host cell with reduced protease phenotype with an expression vector, wherein the vector expresses the polypeptide,
[0076] (b) cultivating the host cell in a nutrient medium, under conditions conducive to expression of the polypeptide
[0077] (c) expressing the polypeptide in the host cell, and
[0078] (d) optionally recovering the polypeptide from the nutrient medium or from the host cell.

### Production of Other Native or Heterologous Polypeptides and Other Sequences

[0079] According to yet another embodiment, the present invention relates to methods of transcribing a downstream nucleotide sequence using a PrtT transcriptional activator in a host cell, wherein the transcribed sequence encodes a desired polypeptide or is a functional nucleic acid molecule, comprising:
[0080] (a) cultivating, in a nutrient medium, a host cell comprising (i) a promoter, (ii) a transcriptional stop signal, a (iii) translational stop signal and (iv) a non-mutated and/or a mutated, enhanced DNA binding site of the present invention, further comprising a downstream nucleotide sequence which encodes a polypeptide, wherein transcription of the downstream nucleotide sequence is activated by PrtT,
[0081] (b) expressing the polypeptide in the host cell, and
[0082] (d) optionally, recovering the polypeptide from the nutrient medium or from the host cell.
   The polypeptide produced may be sensitive to protease degradation. In this case, a mutant host cell which is protease deficient will be used. The protease deficient host cell is preferably produced according to the method of the present invention. Fungi may be grown or maintained in a nutrient medium suitable for production of the desired polypeptide using methods known in the art. For example, cells may be plated on a solid substrate, shaken in a flask, cultivated in small-scale or large-scale fermentation (including continuous, batch, fedbatch, or solid-state fermentation) in laboratory or industrial fermentors in a suitable medium and under conditions allowing the polypeptide to be expressed and/or isolated. Cultivation takes place in a suitable nutrient medium comprising carbon and nitrogen sources and inorganic salts, using procedures known in the art (see, e.g., Bennett & LaSure, eds., More Gene Manipulations in Fungi, Academic Press, CA, 1991). Suitable media are available from commercial suppliers or may be prepared using published compositions (e.g., in catalogues of the American Type Culture Collection). If the polypeptide is secreted into the nutrient medium, the polypeptide can be recovered directly from the medium. If the polypeptide is not secreted, it can be recovered from cell lysates.

[0083] The resulting polypeptide may be isolated by methods known in the art. For example, the polypeptide may be isolated from the nutrient medium by conventional procedures including, but not limited to, centrifugation, filtration, extraction, spray drying, evaporation, or precipitation. The isolated polypeptide may then be further purified by a variety of procedures known in the art including, but not limited to, chromatography (e.g., ion exchange, affinity, hydrophobic, chromatofocusing, or size exclusion), electrophoresis (e.g., preparative isoelectric focusing), differential solubility (e.g., acetone or ammonium sulfate precipitation), or extraction (e.g., chaotrope, salt, or pH). See, e.g., Janson & Ryden, eds., Protein Purification, VCH Publishers, New York, 1989.

[0084] The polypeptide may be detected using methods known in the art that are specific for the polypeptide. These detection methods may include use of specific antibodies, formation of an enzyme product, disappearance of an enzyme substrate, or SDS-PAGE. For example, an enzyme assay may be used to determine the activity of the polypeptide. Procedures for determining enzyme activity are known in the art for many enzymes.

[0085] Cells may produce at least 20% more, at least 50% more, at least 100% more, at least 200% more, or at least 300% more of the polypeptide than a corresponding parent cell when cultivated under the same conditions using one of the given assays. Preferably, the parent cell is one of the deposited strains cited earlier as host cell or as source of the DNA binding site sequence.

[0086] The polypeptide may be any polypeptide whether native or heterologous to the filamentous fungal cell. The term “heterologous polypeptide” is defined herein as a polypeptide, which is not produced by a wild-type filamentous fungal cell. The term “polypeptide” is not meant herein to refer to a specific length of the encoded produce and therefore encompasses peptides, oligopeptides and proteins. The nucleotide sequence encoding a heterologous polypeptide may be obtained from any prokaryote, eukaryote, or other source and may be a synthetic gene. The term “obtained from” as used herein in connection with a given source shall mean that the polypeptide is produced by the source or by a cell in which a gene from the source has been inserted.

[0087] The desired polypeptide may be an antibody or antigen-binding portion thereof, antigen, clotting factor, enzyme, peptide hormone or variant thereof, receptor or ligand-binding portion thereof, regulatory protein, structural protein, reporter, transport protein, intracellular protein, protein involved in a secretory process, protein involved in a folding process, chaperone, peptide amino acid transporter, glycosylation factor, or transcription factor. The polypeptide may be secreted extracellularly into culture medium.

[0088] Enzymes include oxidoreductases, transferases, hydrolases, lyases, isomerases, ligases, catalases, cellulases, chitinases, cutinase, deoxyribonuclease, dextranases, and esterases. The polypeptide may be a carbohydrase, e.g. cellulases such as endoglucanases, β-glucanases, cellobiohydrolases, and β-glucosidases, hemicellulases or pectinolytic enzymes such as xylanases, xylosidases, mannanases, galactanases, galactosidases, pectin methyl esterases, pectin lyases, pectate lyases, endo polygalacturonases, exopolygalacturonases rhamnogalacturonases, arabanases, arabinofuranosidases, arabinoxylan hydrolases, galacturonases, lyases, and amylolytic enzymes; hydrolase, isomerase, or ligase, phosphatases such as phytases, esterases such as lipases, phospholipases, galactolipases, proteolytic enzymes, carboxypeptidase, endo-protease, metallo-protease, serine-protease, amino peptidase, oxidoreductases such as oxidases, transferases, and isomerases. More preferably, the desired polypeptide is a porcine phospholipase. The polypeptide may be an amylase, carbohydrase, catalase, chitinase, cutinase, cyclodextrin glycosyltransferase, deoxyribonuclease, esterase, alpha-galactosidase, beta-galactosidase, glucoamylase, alpha-glucosidase, beta-glucosidase, haloperoxidase, proteolytic enzyme, invertase, laccase, lipase, mannosidase, mutanase, oxidase, pectinolytic enzyme, peroxidase, phospholipase, polyphenoloxidase, ribonuclease, transglutaminase, glucose oxidase, hexose oxidase, or monooxygenase.

[0089] The polypeptide may be human insulin or an analog thereof, human growth hormone, human erythropoietin, human tissue plasminogen activator (tPA), or human insulinotropin.

[0090] Alternatively the polypeptide may be an intracellular protein or enzyme such as, for example, a chaperone, protease, or transcription factor. An example of this is described by Punt et al. (Appl. Microbiol. Biotechnol. 50:447-454, 1998). This can be used for example to improve the efficiency of a host cell as protein producer if this polypeptide, such as a chaperone, protease, or transcription factor, is known to be a limiting factor in protein production.

[0091] In the methods of the present invention, the filamentous fungal cells may also be used for the recombinant production of polypeptides, which are native to the cell. The native polypeptides may be recombinantly produced by, e.g., placing a gene encoding the polypeptide under the control of a different promoter to enhance expression of the polypeptide, to expedite export of a native polypeptide of interest outside the cell by use of a signal sequence, and to increase the copy number of a gene encoding the polypeptide normally produced by the cell. The present invention also encompasses, within the scope of the term “heterologous polypeptide”, such recombinant production of polypeptides native to the cell, to the extent that such expression involves the use of genetic elements not endogenous to the cell, or use of endogenous sequence elements which have been manipulated to function in a manner that do not normally occur in the filamentous fungal cell. The techniques used to isolate or clone a nucleotide sequence encoding a heterologous polypeptide are known in the art and include isolation from genomic DNA, preparation from cDNA, or a combination thereof.

[0092] In the methods of the present invention, heterologous polypeptides may also include a fused or hybrid polypeptide in which another polypeptide is fused at the N-terminus or the C-terminus of the polypeptide or fragment thereof. A fused polypeptide is produced by fusing a nucleotide sequence (or a portion thereof) encoding one polypeptide to a nucleotide sequence (or a portion thereof) encoding another polypeptide.

[0093] Techniques for producing fusion polypeptides are known in the art, and include, ligating the coding sequences encoding the polypeptides so that they are in frame and expression of the fused polypeptide is under control of the same promoter (s) and terminator. The hybrid polypeptides may comprise a combination of partial or complete polypeptide sequences obtained from at least two different polypeptides wherein one or more may be heterologous to the mutant fungal cell. An isolated nucleotide sequence encoding a heterologous polypeptide of interest may be manipulated in a variety of ways to provide for expression of the polypeptide. Expression will be understood to include any step involved in the production of the polypeptide including, but not limited to, transcription, posttranscriptional modification, translation, posttranslational modification, and secretion. Manipulation of the nucleotide sequence encoding a polypeptide prior to its insertion into a vector may be desirable or necessary depending on the expression vector. The techniques for modifying nucleotide sequences utilizing cloning methods are well known in the art.

[0094] Alternatively, the downstream transcribed sequence does not encode any polypeptide but is a functional nucleic acid molecule instead. Splicing or endonucleolytic/exonucleolytic processing of nascent transcripts may be required posttranscriptionally. The nucleic acid molecule may be an antisense or siRNA molecule.

[0095] Modification or inactivation of a host gene may be performed by established antisense techniques using a nucleotide sequence complementary to the nucleotide sequence of the gene. More specifically, expression of the gene by a filamentous fungal cell may be reduced or eliminated by introducing a nucleotide sequence complementary to the nucleotide sequence of the fungal gene, which may be transcribed in the cell and is capable of hybridizing to the mRNA produced in the cell. Under conditions allowing the complementary antisense nucleotide sequence to hybridize to the mRNA, the amount of protein translated is thus reduced or eliminated. Examples of expressing an antisense RNA is provided by Ngiam et al. (Appl. Environ. Microbiol. 66:775-782, 2000) and Zrenner et al. (Planta 190:247-252, 1993).

[0096] Modification, downregulation, or inactivation of a host gene may be obtained via RNA interference (RNAi) techniques (FEMS Microb. Lett. 237:317-324, 2004). More specifically, expression of the gene by a filamentous fungal cell may be reduced or eliminated by cloning identical sense and antisense portions of the nucleotide sequence, which expression is to be affected, behind each other with a nucleotide spacer in between, inserting into an expression vector, and introducing the expression vector into the cell where double-stranded RNA (dsRNA) may be transcribed and then processed to shorter siRNA that is able to hybridize to target mRNA. After dsRNA is transcribed, formation of small (21-23) nucleotide siRNA fragments will lead to a targeted degradation of the mRNA, which is to be affected. The elimination of the specific mRNA can be to various extents. The RNA interference techniques described in WO 2005/05672 and WO 2005/026356 may be used for modification, downregulation, or inactivation of the host gene.

### Processes for the Identification of Protease Genes.

[0097] In a further aspect of the invention, processes for identifying protease genes are provided. One or more differentially expressed genes are detected in corresponding fungal cells either with or without a PrtT transcriptional activator (e.g., deleting prtT or otherwise inactivating PrtT). Gene expression can be determined by methods known to the person skilled in the art. Examples of such expression analyses are aforementioned in the description and include: Northern Blot, Real Time PCR and RT-PCR. Those differentially expressed genes that encode proteases (e.g., as determined by sequence similarity to known proteases, proteolytic activity of the gene product, and possession of a DNA binding site for PrtT) are identified as protease genes controlled by PrtT. Novel proteases so identified and polynucleotides encoding these novel proteases are anticipated by the present invention.

[0098] The present invention is further described by the following examples, which should not be construed as limiting the scope of the invention.

### EXAMPLES

[0099] In the examples described herein, standard molecular cloning techniques such as isolation and purification of nucleic acids, electrophoresis of nucleic acids, enzymatic modification, cleavage and/or amplification of nucleic acids, transformation of E. coli, etc., were performed as described in the literature (Sambrook et al. (2000) “Molecular Cloning: a laboratory manual”, third edition, Cold Spring Harbor Laboratories, Cold Spring Harbor, N.Y.; Innis et al. (eds.) (1990) “PCR protocols, a guide to methods and applications” Academic Press, San Diego). The Aspergillus niger strain (CBS 513.88) used was deposited at the Centraalbureau voor Schimmelcultures Institute (CBS) under the deposit number CBS 513.88.

Construction of a prtT Knock-Out of Aspergillus niger CBS 513.88
CBS 513.88 Delta prtT:

[0100] This A. niger strain contains a deletion of the gene encoding the protease regulator PrtT. CBS 513.88 delta prtT was constructed by using the “MARKER-GENE FREE” approach as described in EP 635574. In this patent it is extensively described how to delete glaA specific DNA sequences in the genome of CBS 513.88. The procedure resulted in a MARKER-GENE FREE recombinant A. niger CBS 513.88 delta prtT, which does not contain any foreign DNA sequences.

[0101] A gene replacement vector for the prtT gene encoding the protease regulator was designed according to known principles and constructed according to routine cloning procedures. In essence, these vectors comprise approximately 1000-3000 bp flanking regions of a prtT ORF for homologous recombination at the predestined genomic locus. In addition, it contains a bi-directional amdS selection marker, in-between direct repeats. The general design of these deletion vectors is disclosed in EP 635574 and WO 98/46772, which are herein incorporated by reference.

[0102] Using oligonucleotides of SEQ ID NO:15 and SEQ ID NO: 16 as primers and genomic DNA of CBS 513.88 as template, PCR was used to amplify a 1.5 kb prtT downstream flanking region and introduce KpnI and XmaI restriction sites at the ends, to allow cloning in pGBDEL (FIG. 4). This 1.5 kb prtT downstream flanking fragment was digested with KpnI and XmaI and introduced in a KpnI and XmaI digested vector pGBDEL, generating pGBDEL-PRT1.

[0103] Using oligonucleotides of SEQ ID NO: 11 and SEQ ID NO: 12 as primers and genomic DNA of CBS 513.88 as template, a 3 kb prtT upstream flanking region, identified as a fragment A, was amplified by PCR. Additionally, a BstBI restriction site was attached to the 5′-end and an overlapping sequence of the prtT downstream region at the 3′-end of the fragment A. Using oligonucleotides of SEQ ID NO: 13 and SEQ ID NO:14 as primers and genomic DNA of CBS 513.88 as template, a 500 bp prtT downstream flanking region, identified as a fragment B, was amplified by PCR. Both resulting fragments, A and B, were fused by sequence overlap extension (SOE-PCR as described by Ho et al., Gene 77:51-59, 1989) using PCR, oligonucleotides of SEQ ID NO:11 and SEQ ID NO:14 as primers and fragments A and B; generating a 3.5 kb fragment C. This fragment C was digested with BstBI and AscI and introduced in a BstBI and AscI digested vector pGBDEL-PRT1, generating pGBDEL-PRT2 (FIG. 5). The sequence of the introduced PCR fragments comprising the upstream and downstream regions of the prtT gene were confirmed by sequence analysis.

[0104] Linear DNA from BstBI/XmaI-digested deletion vector pGBDEL-PRT2 was isolated and used to transform CBS 513.88. This linear DNA can integrate into the genome at the prtT locus, thus substituting the prtT coding sequence with the construct containing amds (see FIG. 6). Transformants were selected on acetamide media and colony purified according to standard procedures. Growing colonies were diagnosed by PCR for integration at the prtT locus. Deletion of the prtT gene was detectable by amplification of a band, with a size specific for the pGBDEL-PRT2 insert and loss of a band specific for the wild-type prtT locus. Spores were plated on fluoro-acetamide media to select strains, which lost the amds marker. Candidate strains were tested using Southern analysis for proper deletion of the prtT gene. Strains delta prtT were selected as representative strains with the prtT gene inactivated (see FIG. 6).

Construction of a pepA Knock-Out of Aspergillus niger CBS 513.88
CBS 513.88 Delta pepA:

[0105] A pepA deficient Aspergillus niger CBS 513.88 was generated as described by van den Hombergh et al. (Eur. J. Biochem. 247:605-613, 1997)

Generation of a prtT Knock-Out of CBS 513.88 Delta pepA
CBS 513.88 Delta prtT Delta pepA:

[0106] The method described for the construction of CBS 513.88 delta prtT was used to analogously construct a prtT knockout of CBS 513.88 delta pepA, to result in CBS 513.88 delta prtT delta pepA.

A. niger Shake Flask Fermentations

[0107] A. niger strains were precultured in 20 ml preculture medium as described in WO 99/32617. After overnight growth, 10 ml of this culture was transferred to fermentation medium 1 (FM1) with 7% glucose as described in WO 99/32617. This FM1 contains per liter: 25 g casein hydrolysate, 12.5 g yeast extract, 1 g KH₂PO₄, 2 g K₂SO₄, 0.5 g MgSO₄.7H₂O, 0.03 g ZnCl₂, 0.02 g CaCl₂, 0.01 g MnSO₄.4H₂O, 0.3 g FeSO₄.7H₂O, 10 ml pen-strep (5000 IU/ml penicillin and 5 mg/ml streptomycin), adjusted to pH 5.6 with 4N H₂SO₄. Fermentation is performed in 500 ml flasks with baffle bottoms containing 100 ml fermentation broth at 34° C. and 170 rpm for the number of days indicated.

[0108] For protease induction, mycelia were harvested after culturing for 16-24 hr in FM1, washed at room temperature with Induction Medium (IM) and transferred to IM with C-source as indicated.

### Induction Medium (IM) Contains Per Liter:

[0109] 6 g NaNO₃, 0.5 g KCl, 1.5 g KH₂PO₄, 1.13 ml of 4M KOH, 0.5 g MgSO₄.7H₂O, 0.01% (w/v) casamino acids, 0.1% (w/v) yeast extract, 1 ml of stock trace elements (stock trace elements per liter: 22 g ZnSO₄.7H₂0, 11 g H₃BO₃, 5 g FeSO₄.7H₂0, 1.7 g CoCl₂.6H₂O, 1.6 g Cu₂SO₄.5H₂O, 5 g MnCl₂.4H₂O, 1.5 g Na₂MoO₄.2H₂O, 50 g EDTA, adjust the pH to 6.5 with 4M KOH, filter sterilize and store in the dark at 4° C.), 10 ml of stock vitamins (stock vitamins per liter: 200 mg riboflavin, 200 mg thiamine.HCl, 200 mg nicotinamide, 100 mg pyridoxine-HCl, 20 mg panthothenic acid, 0.4 mg biotin, adjusted to pH 6 with 4M NaOH, filter sterilize and store in the dark at 4° C.), and adjusted to pH 5.6, containing 1% (w/v) collagen or 2% (w/v) defatted soy flour.

Construction of a Collagen Induced cDNA Library

[0110] A. niger strain CBS 513.88 was cultivated in 100 ml of medium as described herein at 34° C. and 170 rpm in an incubator shaker using a 500 ml baffled shaker flask. A. niger CBS 513.88 was precultured overnight and subsequently the mycelium was transferred to Fermentation Medium 1 (FM1 contains per liter: 25 g casein hydrolysate, 12.5 g yeast extract, 1 g KH₂PO₄, 2 g K₂SO₄, 0.5 g MgSO₄.7H₂0, 0.03 g ZnCl₂, 0.02 g CaCl₂, 0.01 g MnSO₄.4H₂O, 0.3 g FeSO₄.7H₂O, 10 ml pen-strep (5000 IU/ml penicillin and 5 mg/ml streptomycin), adjusted to pH 5.6 with 4N H₂SO₄). After 20 hr of growth, the mycelium was shifted to Induction Medium.

[0111] Mycelia harvested 18 hr, 28 hr, or 48 hr after the shift to IM containing 1% (w/v) collagen or 2% (w/v) defatted soy flour were used for RNA extractions. The RNA extractions and mRNA isolations were performed as described in detail in WO 99/32617. The construction of a cDNA expression library comprising a.o. the cDNA synthesis, the ligation of linkers and E. coli transformation is described as well in WO 99/32617. Linkers used for the cDNA reactions consisted of a HindIII and XhoI restriction sites. The resulting cDNA pools were ligated in the HindIII-XhoI digested pGBFIN-23 vector, which construction and use is described in WO 99/32617. A physical map of pGBFIN-23 can be found in FIG. 3. The ligation mixtures were used to transform DH10B electrocompetent cells (Invitrogen) resulting in the generation of over 10⁵ colonies per cDNA library obtained from both the soy flour and the collagen induced mycelium. Random sequencing of 96 clones of each of the two libraries indicated a low percentage of vectors without insert. The insert sizes for the clones sequenced were between 0.5 kb to 4.7 kb with an average of 1.7 kb. To enable an efficient screening format, the library was constructed in pools of 10³ clones. For each of these pools, glycerol stocks were made and stored for later use.

### Protease Activity Assays

[0112] Total acidic endoprotease activities in culture supernatants were determined as the amount of degraded bovine serum albumin (BSA). 450 μl of 1% (w/v) BSA in 0.1M NaOAc pH 4.0 was incubated with 50 μl culture supernatant at 37° C. for different time intervals. At the end of the incubation period, the remainder of the BSA was precipitated with 500 μl of 10% (w/v) trichloracetic acid (TCA) and followed by incubation on ice for 10 min. The precipitate was centrifuged for 10 min at 13000 rpm in an Eppendorf centrifuge. The absorbance of the supernatant was measured at 280 nm. One unit of protease activity was defined in the Anson assay (J. Gen. Physiol. 22:79-89, 1938) as the change in absorbance units at 280 nm per hour. A more detailed description and references for this method is also described by van den Hombergh et al. (Curr. Genet. 28:299-308, 1995).

### Example 1

### Detection of the PrtT-Binding Site

[0113] Detection of Differentially Expressed Genes in CBS 513.88 Delta prtT

[0114] PrtT is a protease transcriptional regulator, an activator of several proteases WO 00/20596, WO 01/68864 and WO 06/040312. By the comparison of gene expression in the CBS 513.88 and CBS 513.88 delta prtT strains grown under the identical conditions the genes that expression is affected by the deletion of the PrtT transcriptional regulator can be detected. For the detection of differentially expressed genes several approaches, which are known in the art, can be used:
[0115] (i) Northern blot hybridization of RNA samples isolated from the CBS 513.88 and CBS 513.88 delta PrtT-1 grown under the identical conditions using specific probes for known protease-encoding genes (for the specific probes see van den Hombergh, An analysis of the proteolytic system in Aspergillus in order to improve protein production, Ph.D. thesis, 1996; ISBN 90-5485-545-2; van Wijk-Basten, Aminopeptidases from Aspergillus niger, Ph.D. thesis, 2004; ISBN 90-5808-968-1);
[0116] (ii) construction of subtraction cDNA library (methods available from companies such as Invitrogen, Genomax, and others) and identification of differentially expressed genes by sequencing of the cDNA clones; and
[0117] (iii) microarray analysis of the whole transcriptome with microarray such as the Affymetrix GeneChip® arrays.
   We used a custom-made A. niger Affymetrix GeneChip® array to identify differentially expressed genes in CBS 513.88 and CBS 513.88 delta prtT strains grown under the FM1 conditions. Genes encoding proteases that showed significantly lower expression levels in the CBS 513.88 delta prtT strain compared to CBS 513.88 are listed in the Table 1.

### Identification of Putative PrtT-Binding Sites

[0118] The 1.0 kb promoter region of the protease-encoding genes in Table 1 was obtained from the nucleotide sequence of the CBS 513.88 strain and contains the sequence immediately upstream from the translation initiation start point of the corresponding gene. The 1.0 kb promoter regions were analyzed using the Multiple Alignment Construction and Analysis Workbench (MACAW) program (version 2.0.5 for Macintosh). This software uses the multiple alignment algorithm (Karlin & Altschul, Proc. Nat. Acad. Sci. USA 87:2264-2268, 1990; Schuler et al., Proteins: Structure, Function, and Genetics 9:180-190, 1991; Lawrence et al., Science 262:208-214, 1993). The parameters were set up as follows: minimum pattern width: 6, maximum pattern width: 25, random seed: 12345, number of trials: 3, iterations per trial: 50.

[0119] This search resulted in the identification of a 7 nucleotide long imperfect palindrome sequence 5′-C C G A/T C G G-3′ in all the protease-encoding genes experimentally detected (Table 1). Further searching upstream or downstream of the palindrome sequence in the promoters led to refinement of the sequence to a 33 nucleotide long sequence 5′-G/C(N)₅ C C G A/T C G G (N)₁₉ G/C-3′ (SEQ ID NO: 22), where N═C or G or A or T (see Table 2). PrtT contains the zinc binuclear cluster Zn(II)₂-Cys₆ DNA binding domain. For a number of yeast and fungal Zn(II)₂-Cys₆ type of transcription factors the binding site has been detected and most of these sites contain two CGG half-sites aligned in inverted, everted (a sequence oriented in opposite direction, for instance target sequence is CGG, everted is CCG), or direct repeats, and separated by a fixed number of nucleotides characteristic of the transcription factor (Kim et al., Mol. Cel. Biol. 23:5208-5216, 2003; Cahuzac et al., Structure 9:827-836, 2001; Le Crom et al., Mol. Cell. Biol. 22:2642-2649, 2002 The putative binding site identified above contains the everted repeat, CCGA/TCGG, that suggest that this site is a part of the sequence for PrtT binding.

Search of the Entire A. niger Genome for PrtT-Binding Sites

[0120] Having identified the putative PrtT-binding site in the experimentally detected set of proteases we have searched the 1.0 kb region of all predicted open reading frames (ORF's) in the genome of the CBS 513.88 for other protease-encoding genes that could be regulated via the 33 nucleotide long sequence 5′-G/C(N)₅ C C G A/T C G G (N)₁₉ G/C-3′ (SEQ ID NO: 22). This search let to the identification of more than 400 ORF's. In order to select from this set of genes the possible protease encoding genes we have applied the following method:
[0121] (i) we have created a file of all Pfam domains that are identified in the MEROPS peptidase database (release 7.20, Rawlings et al., Nucl Acids Res. 32:D160-D164, 2004) as the Pfam domains present in peptidases/proteases;
[0122] (ii) we used the Pfam domain list to search in the genome of the CBS 513.88 for all the ORF's that encode a protein containing a Pfam domain identified in (i).

[0123] By the overlap of the list of more than 400 ORF's that contained in the 1.0 kb promoter region the 33 nucleotide long sequence 5′-G/C(N)₅ C C G A/T C G G (N)₁₉ G/C-3′ (SEQ ID NO: 22), the extended putative binding site of PrtT, and the list obtained in (ii) we have in silico identified additional 16 proteases that could be the potential target of the PrtT regulator. In order to confirm the identity of the gene as being a peptidase/protease, we performed the MEROPS Blast search (http://merops.sanger.ac.uk/) with the identified sequence. Out of the 16 sequences (Table 3), eight had the E-value of the MEROPS Blast search lower than e⁻²⁵ that we had set up as the cut-off value for a gene to be identified as a protease/peptidase.

[0124] Similarly, as described above for the search with the extended PrtT-binding site, we performed a search using only the imperfect palindromic sequence, 5′-C C G T/A C G G-3′. The results are described in Table 4. Additional 15 putative peptidase/protease encoding genes were identified. By applying the MEROPS Blast search E-value restriction described above, 11 genes could be specified as a peptidase/protease encoding gene.

[0125] The in silico search identified additionally 8 peptidase/protease-encoding genes that contain in their 1.0 kb promoter region the extended putative PrtT-binding site, 5′-G/C(N)₅ C C G A/T C G G (N)₁₉-G/C-3′ (SEQ ID NO: 22), and 11 peptidase/protease-encoding genes that contain in their 1.0 kb promoter region the putative PrtT-binding site, the imperfect palindrome sequence, 5′-C C G T/A C G G-3′.

TABLE 1
Protease-encoding genes that are significantly downregulated in
the Aspergillus niger CBS 513.88 deltaprtT strain as compared
to the parental Aspergillus niger CBS513.88 strain.
Protease encoding genes downregulated in the CBS 513.88
delta prtT strain

| | SEQ ID NO: | Description |
|---|---|---|
| 1. | 23, 24, 25 | strong similarity to protein PRO304 from patent |
| | | WO200104311-A1 - Homo sapiens |
| 2. | 26, 27, 28 | aspartic proteinase aspergillopepsin I pepA - |
| | | Aspergillus niger |
| 3. | 29, 30, 31 | proteinase aspergillopepsin II - Aspergillus |
| | | niger |
| 4. | 32, 33, 34 | strong similarity to lysosomal pepstatin |
| | | insensitive protease CLN2 - Homo sapiens |
| 5. | 35, 36, 37 | strong similarity to serine-type carboxypeptidase |
| | | I cdpS - Aspergillus saitoi |
| 6. | 38, 39, 40 | similarity to putative serine peptidase - Oryza |
| | | sativa |
| 7. | 41, 42, 43 | strong similarity to carboxypeptidase S1 - |
| | | Penicillium janthinellum |
| 8. | 44, 45, 46 | strong similarity to hypothetical lysosomal |
| | | pepstatin insensitive protease CLN2 - Canis lupus |
| 9. | 47, 48, 49 | similarity to lysosomal protease CLN2 - Rattus |
| | | norvegicus |
| 10. | 50, 51, 52 | strong similarity to dipeptidyl peptidase III - |
| | | Rattus norvegicus |
| 11. | 53, 54, 55 | lysine aminopeptidase apsA - Aspergillus niger |
| 12. | 56, 57, 58 | strong similarity to dipeptidyl peptidase II |
| | | DPPII - Rattus norvegicus |
| 13. | 59, 60, 61 | strong similarity to hypothetical beta-lactamase |
| | | XF1621 - Xylella fastidiosa |

The three SEQ ID NO's depicted for each gene represent: genomic DNA, cDNA and protein, respectively. The genomic DNA sequence additionally comprises a 1200 bp fragment upstream of the transcription start.

TABLE 2

Extended binding site in the experimentally determined
protease-encoding genes

| | | |
|---|---|---|
| | | Extended binding site |
| SEQ ID | | C/G(N)₅CCGA/TCGG(N)₁₉C/G |
| NO: | Description | N = any nucleotide |

| | | | |
|---|---|---|---|
| 1. | 23, 24, 25 | strong similarity to | CTACACCCGACGGAGAGCCGGGGAGAGCATCGG |
| | | protein PR0304 from | |
| | | patent WO200104311-A1- | |
| | | Homo sapiens | |
| 2. | 26, 27, 28 | aspartic proteinase | GGAGGCCCGACGGACCCTGCGCGATCGGCGGTG |
| | | aspergillopepsin I | |
| | | pepA - Aspergillus | |
| | | niger | |
| 3. | 29, 30, 31 | proteinase | GCTGCCCCGACGGTGAACCTTTCTGCATCCCCG |
| | | aspergillopepsin II - | GCCAAGCCGTCGGACGTCCGTCCCCCCTCTTTC |
| | | Aspergillus niger | |
| 4. | 32, 33, 34 | strong similarity to | CGATCGCCGTCGGACTCCGGGTGGGAATCAGGG |
| | | lysosomal pepstatin | |
| | | insensitive protease | |
| | | CLN2 - Homo sapiens | |
| 5. | 35, 36, 37 | strong similarity to | GGCTTTCCGACGGCCTCCTCTGCATCCCCTCAC |
| | | serine-type | |
| | | carboxypeptidase I | |
| | | cdpS - Aspergillus | |
| | | saitoi | |
| 6. | 38, 39, 40 | similarity to putative | CGCTCTCCGACGGTGCACAACAATCAATTCTGC |
| | | serine peptidase - | |
| | | Oryza sativa | |
| 7. | 41, 42, 43 | strong similarity to | CGGACTCCGTCGGCTCTGCCAGCGATCGGCAGG |
| | | carboxypeptidase S1 - | |
| | | Penicillium | |
| | | janthinellum | |
| 8. | 44, 45, 46 | strong similarity to | CGCCCTCCGACGGCCCAAACCCACTGCAGAATG |
| | | hypothetical lysosomal | |
| | | pepstatin insensitive | |
| | | protease CLN2 - Canis | |
| | | lupus | |
| 9. | 47, 48, 49 | similarity to | GCAACCCCGTCGGAGTGTATACGGAGATGCGTC |
| | | lysosomal protease | |
| | | CLN2 - Rattus | |
| | | norvegicus | |
| 10. | 50, 51, 52 | strong similarity to | CTTTCCCCGACGGTGACCCGACGTAGCAGTGAC |
| | | dipeptidyl peptidase | CCGCCTCCGTCGGGCCACAGCTCCGTTGGATCG |
| | | III - Rattus | |
| | | norvegicus | |
| 11. | 53, 54, 55 | lysine aminopeptidase | GGACGACCGACGGAATTCCCGCGGCAAAAAGGG |
| | | apsA - Aspergillus | |
| | | niger | |
| 12. | 56, 57, 58 | strong similarity to | GGGAGACCGACGGATAACGCGACGATCGCCGTC |
| | | dipeptidyl peptidase | |
| | | II DPPII - Rattus | |
| | | norvegicus | |
| 13. | 59, 60, 61 | strong similarity to | GGAGCTCCGACGGGGAAACTCAGCATGTCAGCC |
| | | hypothetical beta- | |
| | | lactamase XF1621 - | |
| | | Xylella fastidiosa | |

List of the extended nucleotide sequences 5′-C/G(N)₅CCGA/TCGG(N)₁₉C/G-3′ (SEQ ID NO:22) of putative PrtT-binding sites for the protease-encoding genes of Table 1. The imperfect palindromic nucleotide sequence defined by the MACAW program is underlined. The three SEQ ID NO's depicted for each gene represent: genomic DNA, cDNA and protein, respectively. The genomic DNA sequence additionally comprises a 1200 bp fragment upstream of the transcription start.

TABLE 3

Extended binding site in the protease-encoding genes detected in
silico using palindromic CCGA/TCGG sequence

| | | |
|---|---|---|
| | | Extended binding site |
| SEQ ID | | C/G(N)₅CCGA/TCGG(N)₁₉C/G |
| NO: | Description | N = any nucleotide |

| | | | |
|---|---|---|---|
| 14. | 62, 63, | strong similarity to | GGAGGCCCGACGGCCATCAACCGCCGAACATCC |
| | 64 | aspartic proteinase Yps3 - | |
| | | Saccharomyces | |
| | | cerevisiae | |
| 15. | 65, 66, | strong similarity to | CAGCCACCGTCGGTCCTATCATCATCGCCCTGG |
| | 67 | aspergillopepsin II | |
| | | precursor (acid | |
| | | proteinase A) | |
| | | Aspergillus niger | |
| 16. | 68, 69, | strong similarity to | CCGGGCCCGTCGGATATGCGCAGGCGGTGCTGG |
| | 70 | glutamate | |
| | | carboxypeptidase II - | |
| | | Rattus norvegicus | |
| 17. | 71, 72, | strong similarity to | GTAAAACCGACGGAGGTAAAACCCCGGTCATTC |
| | 73 | extracellular protease | |
| | | precursor Bar1 - | |
| | | Saccharomyces cerevisiae | |
| 18. | 74, 75, | similarity to axin- | GTGGGTCCGACGGCCATCACCCATTTCGAATTC |
| | 76 | associating molecule | |
| | | Axam - Rattus norvegicus | |
| 19. | 77, 78, | strong similarity to | GTGACCCCGTCGGCCCGGTAACCGCTGACTCAG |
| | 79 | constitutive | |
| | | photomorphogenic COP9 | |
| | | complex chain AJH2 - | |
| | | Arabidopsis thaliana | |
| 20. | 80, 81, | similarity to indole-3- | GGGAAGCCGTCGGCAGATGCGCCAATACGAAGC |
| | 82 | acetyl-L-aspartic acid | |
| | | hydrolase IAA-asp - | |
| | | Enterobacter agglomerans | |
| 21. | 83, 84, | strong similarity to | CGGAGTCCGACGGAGGCACTAAAAGCGCCCCAC |
| | 85 | glutamine-fructose-6- | |
| | | phosphate transaminase | |
| | | Gfa1 - Saccharomyces | |
| | | cerevisiae | |

List of the extended nucleotide sequences 5′-C/G(N)₅CCGA/TCGG(N)₁₉C/G-3′ (SEQ ID NO:22) of putative PrtT-binding sites detected in protease-encoding genes by in silico analysis of the CBS513.88 nucleotide sequence. The imperfect palindromic nucleotide sequence defined by the MACAW program is underlined. The three SEQ ID NO's depicted for each gene represent: genomic DNA, cDNA and protein, respectively. The genomic DNA sequence additionally comprises a 1200 bp fragment upstream of the transcription start.

TABLE 4
Palindrome binding site in the in silico determined protease

| | | | |
|---|---|---|---|
| | | | Palindrome |
| | E value/ | | binding site |
| SEQ ID NO: | family | Description | CCGA/TCGG |

| | | | | |
|---|---|---|---|---|
| 22. | 86, 87, 88 | 1.10 e−70 | similarity to carboxypeptidase D - | CCGACGG |
| | | S10 | Penicillium janthinellum | |
| 23. | 89, 90, 91 | 1.1 e−111 | strong similarity to leucyl | CCGTCGG |
| | | M1 | aminopeptidase Ape2 - | |
| | | | Saccharomyces cerevisiae | |
| 24. | 92, 93, 94 | 1.8 e−04 | weak similarity to S-layer | CCGACGG |
| | | S8A | protein - Clostridium | |
| | | | thermocellum | |
| 25. | 95, 96, 97 | 1.9 e+00 | similarity to vacuolar | CCGTCGG |
| | | S24 | carboxypeptidase Y Cpy - | |
| | | | Saccharomyces cerevisiae | |
| 26. | 98, 99, 100 | 2.20 e−78 | strong similarity to ubiquitin | CCGACGG |
| | | C19 | specific protease Ubp2 - | |
| | | | Saccharomyces cerevisiae | |
| 27. | 101, 102, | 5.20 e−02 | strong similarity to proteasome | CCGTCGG |
| | 103 | M22 | 19S regulatory particle subunit | |
| | | | Rpn2 - Saccharomyces cerevisiae | |
| 28. | 104, 105, | 6.60 e−46 | similarity to aminopeptidase P | CCGTCGG |
| | 106 | M24B | pepP - Lactococcus lactis | |
| 29. | 107, 108, | 4.5 e−0 | similarity to hypothetical RNA | CCGACGG |
| | 109 | I2 | export mediator like protein | |
| | | | CAD21423.1 - Neurospora crassa | |
| 30. | 110, 111, | 1.80 e−155 | strong similarity to vacuolar | CCGACGG |
| | 112 | M18 | aminopeptidase Ysci - | |
| | | | Saccharomyces cerevisiae | |
| 31. | 113, 114, | 1.10-128 | similarity to lactone-specific | CCGACGG |
| | 115 | S33 | esterase estf1 - Pseudomonas | |
| | | | fluorescens | |
| 32. | 116, 117, | 8.20 e−48 | strong similarity to prolidase - | CCGACGG |
| | 118 | M38 | Aureobacterium esteraromaticum | |
| 33. | 119, 120, | 4.10 e−140 | strong similarity to methionyl | CCGACGG |
| | 121 | M24A | aminopeptidase P67ETF2 - Homo | |
| | | | sapiens | |
| 34. | 122, 123, | 1.10 e−128 | strong similarity to hypothetical | CCGACGG |
| | 124 | S33 | protein SPAC6G10.03c - | |
| | | | Schizosaccharomyces pombe | |
| 35. | 125, 126, | 2.10 e−193 | strong similarity to precursor of | CCGACGG |
| | 127 | S10 | carboxypeptidase Kex1 - | |
| | | | Saccharomyces cerevisiae | |
| 36. | 128, 129, | 6.40 e−222 | carboxypeptidase Y cpy from | CCGACGG |
| | 130 | S10 | patent WO9609397-A1 - Aspergillus | |
| | | | niger | |

List of protease-encoding genes identified in silico that contain the sequence 5′-CCGA/TCGG-3′ in their 1.2 kb promoter regions. The imperfect palindromic nucleotide sequence defined by the MACAW program is underlined. The E-value of the Blast MEROPS search is shown in the column E-value/family together with the protease family to which the encoded protein likely belongs. The three SEQ ID NO's depicted for each gene represent: genomic DNA, cDNA and protein, respectively. The genomic DNA sequence additionally comprises a 1200 bp fragment upstream of the transcription start.

### Example 2

### Functionality of the PrtT-Binding Site

[0126] Construction and Analysis of Different Variants of the pepA Promoter Containing Distinct Mutations of the PrtT-Binding Site

[0127] A 1 kb promoter region of ppepA was amplified by PCR using oligonucleotides of SEQ ID NO: 1 and SEQ ID NO: 2 as primers and genomic DNA of CBS 513.88 as template, resulting in an amplification product containing SEQ ID NO: 17.

[0128] A 0.6 kb promoter region of pepA was amplified by PCR using oligonucleotides of SEQ ID NO: 3 and SEQ ID NO: 2 as primers and genomic DNA of CBS 513.88 as template, resulting in an amplification product containing SEQ ID NO: 18. The pepA coding sequence was amplified by PCR using oligonucleotides of SEQ ID NO: 5 and SEQ ID NO: 6 as primers and the cDNA library (collagen) as template, resulting in an amplification product containing SEQ ID NO: 21. PCR fragments were purified through PCR column (QIAGEN) and used in fusion PCR to obtain 1 kb ppepA-pepA cDNA fragment and 0.6 kb ppepA-pepA cDNA fragment. These were cloned and sequenced. 1 kb ppepA-pepA cDNA pCR-Blunt-Topo™ plasmid was used as a template to perform site-directed mutagenesis using a QuickChange™ site-directed mutagenesis kit (Stratagene). Table 5 gives the overview of the mutations that have been introduced in the extended 33 bp long PrtT binding sequence, 5′-G/C(N)₅ C C G A/T C G G (N)₁₉ G/C-3′, of the pepA promoter. The mutations cover the imperfect palindrome sequence CCGACGG and/or the conserved terminal C/G positions. Oligonucleotides used for introducing these mutations are listed in Table 5. After mutagenesis the complete 1 kb ppepA-pepA cDNA insert in pCR-Blunt-Topo™ plasmid was re-sequenced in order to confirm the presence of the desired mutation and to exclude the presence of other mutations, possibly introduced by PCR.

[0129] One good clone for each mutant or variant was selected and used to prepare the final expression vector using XhoI/AscI as cloning sites (FIG. 2). The obtained constructs were transformed into CBS 513.88 delta pepA (see FIG. 1) and in CBS 513.88 delta prtT delta pepA strain. Obtained transformants were checked by colony PCR using SEQ ID NO: 1 and SEQ ID NO: 2 (for all constructs carrying 1 kb ppepA promoter) or using SEQ ID NO: 2 and SEQ ID NO: 3 as primers (for the construct carrying 0.6 kb ppepA promoter). The integration of the constructs was targeted to the glucoamylase locus (glaA, see FIG. 2) using the flanks present in the vector. Correct transformants were grown for 10 days in 100 ml CSM/MES medium (150 g/kg maltose.H₂O, 60 g/kg Bacto soyton, 1 g/kg NaH₂PO₄, 15 g/kg (NH₄)₂SO₄, 1 g/k MgSO₄.7H₂0, 0.08 g/kg Tween-80, 0.02 g/kg Basildon, 20 g/kg MES, 1 g/kg L-arginine, pH 6.2) in 500 ml baffled shake flasks at 30° C. at 250 rpm. After 10 days, the supernatant was harvested and protease activity was measured using the Anson assay (J. Gen. Physiol. 22:79-89, 1938). The results are shown in FIG. 1.

[0130] The results depicted in FIG. 1 clearly show that extracellular protease activity is strongly reduced when the palindrome CCGACGG is mutated or not present in the ppepA-pepA construct in a CBS 513.88 delta pepA background, indicating reduced transcriptional activity from the mutated ppepA promoter. The mutations in the other two conserved positions (the terminal G/C residues) in the 33 bp long extended PrtT binding site affect the transcription efficiency from the pepA promoter by about 25%. Surprisingly, the combination of the mutation in the 5′ end of the binding site (G to T) and insertion of one extra nucleotide in the imperfect palindrom (CCGACGG to CCGATCGG) created the pepA mutant promoter with increased transcriptional efficiency by about 40%. The sequence of the stronger pepA promoter is mentioned under the SEQ ID NO:139.

[0131] The dependency of the transcription of pepA on PrtT is further demonstrated below. When a non-modified 1.0 kb ppepA-pepA cDNA construct was transformed to CBS 513.88 delta pepA, a strong increase in extracellular protease activity was observed. However, when this construct was transformed into CBS 513.88 delta prtT delta pepA (data not shown) no extracellular activity was observed, indicating that pepA activity is highly dependent on PrtT mediated transcription. In more detail, the palindrome CCGACGG is very important for PrtT mediated transcription of pepA. This leads to the conclusion that CCGACGG is the PrtT-binding site in the pepA promoter. The effect of the two terminal conserved residues of the extended PrtT binding site might be in stabilization of the protein-DNA complex.

TABLE 5

| | | | |
|---|---|---|---|
| | Extended PrtT binding site | | |
| | C/G(N)₅CCGA/TCGG(N)₁₉C/G | | |
| | N = any nucleotide | | |
| Mutant | ppepA PrtT binding site | | |
| no. | GGAGGCCCGACGGACCCTGCGCGATCGGCGGTG | Forward primer | Reverse primer |

| | | | |
|---|---|---|---|
| 1. | GGAGGCCAGACTGACCCTGCGCGATCGGCGGTG | SEQ ID NO. 7 | SEQ ID NO. 8 |
| 2. | GGAGGCAAGACTTACCCTGCGCGATCGGCGGTG | SEQ ID NO. 9 | SEQ ID NO. 10 |
| 3. | TGAGGCCCGAtCGGACCCTGCGCGATCGGCGGTG | SEQ ID NO. 131 | SEQ ID NO. 132 |
| 4. | TGAGGCCAGACGGACCCTGCGCGATCGGCGGTG | SEQ ID NO. 133 | SEQ ID NO. 134 |
| 5. | AGAGGCCCGACGGACCCTGCGCGATCGGCGGTG | SEQ ID NO. 135 | SEQ ID NO. 136 |
| 6. | GGAGGCCCGACGGACCCTGCGCGATCGGCGGTA | SEQ ID NO. 137 | SEQ ID NO. 138 |

Over-view of mutations created in the pepA promoter. The mutated nucleotides are depicted in bold and the PrtT binding site is underlined. The oligonucleotide primer sequences that were used to introduce these mutations are listed in the right-hand two columns.

[0132] The invention described and claimed herein is not to be limited in scope by the specific embodiments herein enclosed, since these embodiments are intended as illustrations of several aspects of the invention. Any equivalent embodiments are intended to be within the scope of this invention. Indeed, various modifications of the invention in addition to those shown and described herein will become apparent to those skilled in the art from the foregoing description. Such modifications are also intended to fall within the scope of the appended claims. In case of conflict, the present disclosure including definitions will control.

The application's sequence listing, which the Patent Office published only in electronic form, follows.

SEQUENCE LISTING (139 sequences)

SEQ ID NO: 1 - DNA, 30 bp, Artificial Sequence
  synthetic primer for polymerase chain reaction
ggggctcgaggcttttggcttgtgatcttg

SEQ ID NO: 2 - DNA, 36 bp, Artificial Sequence
  synthetic primer for polymerase chain reaction
ctgaagacgaccattttgaccacgagaatgtcaagc

SEQ ID NO: 3 - DNA, 30 bp, Artificial Sequence
  synthetic primer for polymerase chain reaction
ggggctcgaggcgcaatctaaggacatccg

SEQ ID NO: 4 - skipped

SEQ ID NO: 5 - DNA, 38 bp, Artificial Sequence
  synthetic primer for polymerase chain reaction
cattctcgtggtcaaaatggtcgtcttcagcaaaaccg

SEQ ID NO: 6 - DNA, 34 bp, Artificial Sequence
  synthetic primer for polymerase chain reaction
ggggggcgcgccctaagcctgagcggcgaatccc

SEQ ID NO: 7 - DNA, 32 bp, Artificial Sequence
  synthetic primer for polymerase chain reaction
ggcgtctccggaggccagactgaccctgcgcg

SEQ ID NO: 8 - DNA, 32 bp, Artificial Sequence
  synthetic primer for polymerase chain reaction
cgcgcagggtcagtctggcctccggagacgcc

SEQ ID NO: 9 - DNA, 32 bp, Artificial Sequence
  synthetic primer for polymerase chain reaction
ggcgtctccggaggcaagacttaccctgcgcg

SEQ ID NO: 10 - DNA, 32 bp, Artificial Sequence
  synthetic primer for polymerase chain reaction
cgcgcagggtaagtcttgcctccggagacgcc

SEQ ID NO: 11 - DNA, 29 bp, Artificial Sequence
  synthetic primer for polymerase chain reaction
cggcttcgaatggctaggtgtcgattttg

SEQ ID NO: 12 - DNA, 41 bp, Artificial Sequence
  synthetic primer for polymerase chain reaction
ggtagtggatcgtgtggaattggcaggcaatctggagagta

SEQ ID NO: 13 - DNA, 21 bp, Artificial Sequence
  synthetic primer for polymerase chain reaction
aattccacacgatccactacc

SEQ ID NO: 14 - DNA, 32 bp, Artificial Sequence
  synthetic primer for polymerase chain reaction
actaggcgcgcctttgtttggtcgatcggaga

SEQ ID NO: 15 - DNA, 31 bp, Artificial Sequence
  synthetic primer for polymerase chain reaction
ttgaggtaccaattccacacgatccactacc

SEQ ID NO: 16 - DNA, 30 bp, Artificial Sequence
  synthetic primer for polymerase chain reaction
tcatcccgggcgtccatcgcattgattctt

SEQ ID NO: 17 - DNA, 1001 bp, Aspergillus niger
gcttttggcttgtgatcttgattgctagagatgtatatcctcacggataccgccggagtgcgccatttctggttaccttctctttccctttttgtctcgatcgtgaggcggaacgcaggatgaagacacggcttctccatcgcggcccaccaaccaacaatgtccttggacgcccaactctccatctactggtcattggtccaatgcagagactccgtcgagctcaaatgggccggccaaccccgagtcgtcaggggcagcggcagcgacgagctaaattagaccactgataagacgcgatagtccaaagtctgaccgtcacattgtgccaggcagataagttgaatcgtgtgactggatgttggctaacgtatggcgtctccggaggcccgacggaccctgcgcgatcggcggtggagcgcaatctaaggacatccgcgcctaagatatctacccttcagcagttcagcctagccctgcagacttgtcggaccagtgctatcgtgatcggcccccacggtcgaatgagctcttgtctctttccgtcagaccctgccagttaatctgctatctactccgcggtaacatcgtgcctgtctccactaaggcagggtccagggctgtatgtcttactttgcaccgagtcggccgccggttggctctgtcttggcaattgcgaatatcctcacgggcgacggacgacacggatttggacggacatgcggagatcttcgtcggtttattcctggaagggacatcatctccttccatcatgacggctgccatagcggggactctgagacatttttgctctgaagagcatggtcgacttggatgatggaggagttgatcgaggtcaatgaggagaggcttgcaagtataagaagagactgctcgaccagcagaatggatcttcttgttcatcaaccaagagtccaaggcttctttgtctggttctatctcttctccgaactctcttgcttgacattctcgtggtcaaa

SEQ ID NO: 18 - DNA, 582 bp, Aspergillus niger
cgcaatctaaggacatccgcgcctaagatatctacccttcagcagttcagcctagccctgcagacttgtcggaccagtgctatcgtgatcggcccccacggtcgaatgagctcttgtctctttccgtcagaccctgccagttaatctgctatctactccgcggtaacatcgtgcctgtctccactaaggcagggtccagggctgtatgtcttactttgcaccgagtcggccgccggttggctctgtcttggcaattgcgaatatcctcacgggcgacggacgacacggatttggacggacatgcggagatcttcgtcggtttattcctggaagggacatcatctccttccatcatgacggctgccatagcggggactctgagacatttttgctctgaagagcatggtcgacttggatgatggaggagttgatcgaggtcaatgaggagaggcttgcaagtataagaagagactgctcgaccagcagaatggatcttcttgttcatcaaccaagagtccaaggcttctttgtctggttctatctcttctccgaactctcttgcttgacattctcgtggtcaaa

SEQ ID NO: 19-20 - skipped (2 entries)

SEQ ID NO: 21 - DNA, 1185 bp, Aspergillus niger
atggtcgtcttcagcaaaaccgctgccctcgttctgggtctgtcctccgccgtctctgcggcgccggctcctactcgcaagggcttcaccatcaaccagattgcccggcctgccaacaagacccgcaccatcaacctgccaggcatgtacgcccgttccctggccaagtttggcggtacggtgccccagagcgtgaaggaggctgccagcaagggtagtgccgtgaccacgccccagaacaatgacgaggagtacctgactcccgtcactgtcggaaagtccaccctccatctggactttgacaccggatctgcagatctctgggtcttctcggacgagctcccttcctcggagcagaccggtcacgatctgtacacgcctagctccagcgcgaccaagctgagcggctacacttgggacatctcctacggtgacggcagctcggccagcggagacgtgtaccgggatactgtcactgtcggcggtgtcaccaccaacaagcaggctgttgaagcagccagcaagatcagctccgagttcgttcagaacacggccaatgacggccttttgggactggcctttagctccatcaacactgtccagcccaaggcgcagaccaccttcttcgacaccgtcaagtcccagctggactctccccttttcgccgtgcagctgaagcacgacgcccccggtgtttacgactttggctacatcgatgactccaagtacaccggttctatcacctacacggatgccgatagctcccagggttactggggcttcagcaccgacggctacagtatcggtgacggcagctccagctccagcggcttcagcgccattgctgacaccggtaccaccctcatcctcctcgatgacgaaatcgtctccgcctactacgagcaggtttctggcgctcaggagagcgaggaagccggtggctacgttttctcttgctcgaccaacccccctgacttcactgtcgtgattggcgactacaaggccgttgttccgggcaagtacatcaactacgctcccatctcgactggcagctccacctgctttggcggtatccagagcaacagcggtctgggactgtccatcctgggtgatgttttcttgaagagccagtacgtggtcttcaactctgagggccctaagctgggattcgccgctcaggcttag

SEQ ID NO: 22 - DNA, 33 bp, Aspergillus niger
  misc_feature (2)..(6): n is a, c, g, or t
  misc_feature (14)..(32): n is a, c, g, or t
snnnnnccgwcggnnnnnnnnnnnnnnnnnnns

SEQ ID NO: 23 - DNA, 3174 bp, Aspergillus niger
tcggggagcatgtcggaggaaaattcaagtcctggcaagagcacggaagcccttgctgtcaacatctctacccgctttaattatctagtatgtatggttatcgattgctcatatttgggtacaagagaaggggaaagtgggctgccgagagctgaggtccattgcagatcggactatttatagttgactggtggcagaattgtgggttccggagaagacaataacagatgatgggggctaatgggagaagattcggacagtgaccagcatacaatagatactggttcccagtgttgctctgatgatggcatctttgacttcacagcgccagtgccattctatccatcctgttccgacttgcttccccacaccaagaagaggaggatcctacacccgacggagagccggggagagcatcggagaagttgatccttgactgagaccatgacagcagaatactacattgtagattgacgataacatggagagagcatgtgcctgatcatgcagccccagtgacctgcctcttcaggatagcccaatgttgcagaaattacggcattggcccgattagctagtggcttatcaagaaagcgggggagaagctaccaaagtgacgaaataggagcagaactatcaattctgctagccgtgccaagaaccaggaaagggagaaggaaggcgggtggagccggtcaggctgggcggtccctgaggttgcactcgagtggcacccgacttgttctcccgccttccgcccagccaatcataagaaacccggtcctggcaaggtcttggcggggatggtgcaagccagccaaacaaccggtttgttggacgccctgcggtacactgaaatcttgggctgttcgacaaaaacaaagcaggtaacacaaagatataatacggcggaatgataggatatccctgtcgatcagccggacaggatggcgctagtgtcacctccagcttcggctaccctcgcagcggacccaatcagcgtccctcccagcccccgatacagtaatggtatgcacatcgcagtcttaatcgcctgcagcggcagtaatgatagtcctgccggtgaataataccccataacaaacaaataaataatactacttatctctcctcgtccctttcactttccctttgccgtcttcaatcccctcatcttggtctcttcggcagcctttcaccatgctgtcgtctctccttagccagggagcagccgtatccctcgcggtgttgtcgctgctcccttcgcctgtagccgcggagatcttcgaaaagctatccggcgtccccaatggtgagttatagaccccaattcttcattttgagccacatactgacgtgattccttcgaatactaccaggctggagatacgccaacaatcctcaaggcaacgaggtcattcgcttgcaaatcgcccttcagcagcatgatgtcgctggtttcgaacaagccgtgatggatatgtccacccccggacacgccgactatggaaagcatttccgcacccacgatgagatgaagcgcatgttgctccccagcgagactgccgtcgactcagtccgcgactggctggaatccgccggtgtccacaatatccaggtcgacgccgactgggtcaagttccataccaccgtaaacaaggccaatgccctgctggatgccgacttcaagtggtatgtcagcgacgccaagcatattcgtcgtctgcgcaccctgcaatactccatccccgacgccctggtctcgcacatcaacatgatccagcccaccacccgctttggccagatccagcccaaccgtgccaccatgcgcagcaagcccaagcacgccgatgagacattcctcaccgcagccaccctggcccagaacacctcccactgcgactccatcatcacaccgcactgtctgaagcagctgtacaacatcggtgactaccaggccgatcccaagtccggcagcaagatcggctttgccagctaccttgaggaatacgcccggtatgccgatctcgagaggttcgagcagcacctggctcccaatgccatcggccagaacttcagcgtcgtccaattcaacggcggcctcaacgatcagctttcatcgagtgacagcggcgaagccaacctcgacctgcagtacatcctgggcgtcagcgctcccgtccccatcaccgagtacagcaccggcggacgcggcgaactagtccccgacctgagctcccccgaccccaacgacaacagcaacgagccctaccttgacttccttcagggaatcctcaagcttaacaactccgacctcccacaagtcatctctacctcctacggtgaagacgaacaggtatgcacctcacctgacccattccattttacatccctcacctctctcaaccaaactaacaacaccaacagactatccccgtcccctacgcccgcaccgtctgcaacctctacgcccaactcggcagccgcggcgtctctgtaatcttctccagcggcgactccggcgtcggcgccgcctgcctcaccaacgacggcaccaaccgcacgcacttccctcctcaattccccgcctcctgcccctgggtaacctccgtcggcgcaacctccaagacctcccccgagcaagccgtctccttctcctccggcggcttctccgacctctggccccgcccctcctaccaacacgccgccgtgcaaacctacctcaccaagcacctgggcaacaagttctcggggcttttcaacgcctccggccgcgccttccccgacgtctccgcgcagggcgtcaactacgctgtttacgacaagggcatgcttggccagttcgacgggacgagttgctccgcgccgacgttcagtggcgtcatcgcgttgttgaacgatgcgagactgagggccgggttgcctgtgatggggttcttgaatccgttcctgtatggtgtcggaagtgagaagggtgcgttgaatgatattgtgaacggcgggagtgtgggttgtgatgggaggaatcggttcgggggcacgcctaatggtagtcctgttgtgccgtttgctagttggaatgccacgaccgggtgggatcctgtgtcggggttgggaacgccggattttgcgaagttgaaaggggtggcgttgggtgaggagggtggtaattaa

SEQ ID NO: 24 - DNA, 1836 bp, Aspergillus niger
  CDS (1)..(1836)
atgctgtcgtctctccttagccagggagcagccgtatccctcgcggtgttgtcgctgctcccttcgcctgtagccgcggagatcttcgaaaagctatccggcgtccccaatggctggagatacgccaacaatcctcaaggcaacgaggtcattcgcttgcaaatcgcccttcagcagcatgatgtcgctggtttcgaacaagccgtgatggatatgtccacccccggacacgccgactatggaaagcatttccgcacccacgatgagatgaagcgcatgttgctccccagcgagactgccgtcgactcagtccgcgactggctggaatccgccggtgtccacaatatccaggtcgacgccgactgggtcaagttccataccaccgtaaacaaggccaatgccctgctggatgccgacttcaagtggtatgtcagcgacgccaagcatattcgtcgtctgcgcaccctgcaatactccatccccgacgccctggtctcgcacatcaacatgatccagcccaccacccgctttggccagatccagcccaaccgtgccaccatgcgcagcaagcccaagcacgccgatgagacattcctcaccgcagccaccctggcccagaacacctcccactgcgactccatcatcacaccgcactgtctgaagcagctgtacaacatcggtgactaccaggccgatcccaagtccggcagcaagatcggctttgccagctaccttgaggaatacgcccggtatgccgatctcgagaggttcgagcagcacctggctcccaatgccatcggccagaacttcagcgtcgtccaattcaacggcggcctcaacgatcagctttcatcgagtgacagcggcgaagccaacctcgacctgcagtacatcctgggcgtcagcgctcccgtccccatcaccgagtacagcaccggcggacgcggcgaactagtccccgacctgagctcccccgaccccaacgacaacagcaacgagccctaccttgacttccttcagggaatcctcaagcttaacaactccgacctcccacaagtcatctctacctcctacggtgaagacgaacagactatccccgtcccctacgcccgcaccgtctgcaacctctacgcccaactcggcagccgcggcgtctctgtaatcttctccagcggcgactccggcgtcggcgccgcctgcctcaccaacgacggcaccaaccgcacgcacttccctcctcaattccccgcctcctgcccctgggtaacctccgtcggcgcaacctccaagacctcccccgagcaagccgtctccttctcctccggcggcttctccgacctctggccccgcccctcctaccaacacgccgccgtgcaaacctacctcaccaagcacctgggcaacaagttctcggggcttttcaacgcctccggccgcgccttccccgacgtctccgcgcagggcgtcaactacgctgtttacgacaagggcatgcttggccagttcgacgggacgagttgctccgcgccgacgttcagtggcgtcatcgcgttgttgaacgatgcgagactgagggccgggttgcctgtgatggggttcttgaatccgttcctgtatggtgtcggaagtgagaagggtgcgttgaatgatattgtgaacggcgggagtgtgggttgtgatgggaggaatcggttcgggggcacgcctaatggtagtcctgttgtgccgtttgctagttggaatgccacgaccgggtgggatcctgtgtcggggttgggaacgccggattttgcgaagttgaaaggggtggcgttgggtgaggagggtggtaattaa

SEQ ID NO: 25 - protein, 611 aa, Aspergillus niger
MLSSLLSQGAAVSLAVLSLLPSPVAAEIFEKLSGVPNGWRYANNPQGNEVIRLQIALQQHDVAGFEQAVMDMSTPGHADYGKHFRTHDEMKRMLLPSETAVDSVRDWLESAGVHNIQVDADWVKFHTTVNKANALLDADFKWYVSDAKHIRRLRTLQYSIPDALVSHINMIQPTTRFGQIQPNRATMRSKPKHADETFLTAATLAQNTSHCDSIITPHCLKQLYNIGDYQADPKSGSKIGFASYLEEYARYADLERFEQHLAPNAIGQNFSVVQFNGGLNDQLSSSDSGEANLDLQYILGVSAPVPITEYSTGGRGELVPDLSSPDPNDNSNEPYLDFLQGILKLNNSDLPQVISTSYGEDEQTIPVPYARTVCNLYAQLGSRGVSVIFSSGDSGVGAACLTNDGTNRTHFPPQFPASCPWVTSVGATSKTSPEQAVSFSSGGFSDLWPRPSYQHAAVQTYLTKHLGNKFSGLFNASGRAFPDVSAQGVNYAVYDKGMLGQFDGTSCSAPTFSGVIALLNDARLRAGLPVMGFLNPFLYGVGSEKGALNDIVNGGSVGCDGRNRFGGTPNGSPVVPFASWNATTGWDPVSGLGTPDFAKLKGVALGEEGGN

SEQ ID NO: 26 - DNA, 2547 bp, Aspergillus niger
gcgaattcgacatgctggaggtgcttctaaatgaacagtatgacggtcatgaggggatagagtcggctggcggagggaaccttccgtcacagtttttgcaatcgtgatcatcgatggtctcatgaatgtacgaatttacgcgtcgtagcttcttcctctttttgcttggattcttgctagttcctttctgtacacttccgcttttggcttgtgatcttgattgctagagatgtatatcctcacggataccgccggagtgcgccatttctggttaccttctctttccctttttgtctcgatcgtgaggcggaacgcaggatgaagacacggcttctccatcgcggcccaccaaccaacaatgtccttggacgcccaactctccatctactggtcattggtccaatgcagagactccgtcgagctcaaatgggccggccaaccccgagtcgtcaggggcagcggcagcgacgagctaaattagaccactgataagacgcgatagtccaaagtctgaccgtcacattgtgccaggcagataagttgaatcgtgtgactggatgttggctaacgtatggcgtctccggaggcccgacggaccctgcgcgatcggcggtggagcgcaatctaaggacatccgcgcctaagatatctacccttcagcagttcagcctagccctgcagacttgtcggaccagtgctatcgtgatcggcccccacggtcgaatgagctcttgtctctttccgtcagaccctgccagttaatctgctatctactccgcggtaacatcgtgcctgtctccactaaggcagggtccagggctgtatgtcttactttgcaccgagtcggccgccggttggctctgtcttggcaattgcgaatatcctcacgggcgacggacgacacggatttggacggacatgcggagatcttcgtcggtttattcctggaagggacatcatctccttccatcatgacggctgccatagcggggactctgagacatttttgctctgaagagcatggtcgacttggatgatggaggagttgatcgaggtcaatgaggagaggcttgcaagtataagaagagactgctcgaccagcagaatggatcttcttgttcatcaaccaagagtccaaggcttctttgtctggttctatctcttctccgaactctcttgcttgacattctcgtggtcaaaatggtcgtcttcagcaaaaccgctgccctcgttctgggtctgtcctccgccgtctctgcggcgccggctcctactcgcaagggcttcaccatcaaccagattgcccggcctgccaacaagacccgcaccatcaacctgccaggcatgtacgcccgttccctggccaagtttggcggtacggtgccccagagcgtgaaggaggctgccagcaagggtagtgccgtgaccacgccccagaacaatgacgaggagtacctgactcccgtcactgtcggaaagtccaccctccatctggactttgacaccggatctgcagatctgtaagcttccctgctcgggtgttcgggcaaatcgtgactaacctggactagctgggtcttctcggacgagctcccttcctcggagcagaccggtcacgatctgtacacgcctagctccagcgcgaccaagctgagcggctacacttgggacatctcctacggtgacggcagctcggccagcggagacgtgtaccgggatactgtcactgtcggcggtgtcaccaccaacaagcaggctgttgaagcagccagcaagatcagctccgagttcgttcagaacacggccaatgacggccttttgggactggcctttagctccatcaacactggtgagtcaatcctacatcagccgggttgacctacctgctgaccgatacacagtccagcccaaggcgcagaccaccttcttcgacaccgtcaagtcccagctggactctccccttttcgccgtgcagctgaagcacgacgcccccggtgtttacgactttggctacatcgatgactccaagtacaccggttctatcacctacacggatgccgatagctcccagggttactggggcttcagcaccgacggctacagtatcggtgacggcagctccagctccagcggcttcagcgccattgctggtaagaaccgccttcatttaacacacaacttgtccacctctttactaactagtgtatagacaccggtaccaccctcatcctcctcgatgacgaaatcgtctccgcctactacgagcaggtttctggcgctcaggagagcgaggaagccggtggctacgttttctcttgctcgaccaacccccctgacttcactgtcgtgattggcgactacaaggccgttgttccgggcaagtacatcaactacgctcccatctcgactggcagctccacctgctttggcggtatccagagcaacagcggtctgggactgtccatcctgggtgatgttttcttgaagagccagtacgtggtcttcaactctgagggccctaagctgggattcgccgctcaggcttag

SEQ ID NO: 27 - DNA, 1185 bp, Aspergillus niger; identical to SEQ ID NO: 21
  CDS (1)..(1185)

SEQ ID NO: 28 - protein, 394 aa, Aspergillus niger
MVVFSKTAALVLGLSSAVSAAPAPTRKGFTINQIARPANKTRTINLPGMYARSLAKFGGTVPQSVKEAASKGSAVTTPQNNDEEYLTPVTVGKSTLHLDFDTGSADLWVFSDELPSSEQTGHDLYTPSSSATKLSGYTWDISYGDGSSASGDVYRDTVTVGGVTTNKQAVEAASKISSEFVQNTANDGLLGLAFSSINTVQPKAQTTFFDTVKSQLDSPLFAVQLKHDAPGVYDFGYIDDSKYTGSITYTDADSSQGYWGFSTDGYSIGDGSSSSSGFSAIADTGTTLILLDDEIVSAYYEQVSGAQESEEAGGYVFSCSTNPPDFTVVIGDYKAVVPGKYINYAPISTGSSTCFGGIQSNSGLGLSILGDVFLKSQYVVFNSEGPKLGFAAQA

SEQ ID NO: 29 - DNA, 2049 bp, Aspergillus niger
cacacctttcctctcccctttctcaatctatctagtatagtactacggagtactaaccttgtactatactctttccatcccaacctgcgcccctcccctaattgcttatcattcgcccacaaggcttggacgaagcttgttgtgcctgcgccggtgccgcttccctcccctcctcccctgccttttcgggcgacgccatccgcgcactaaccctccacgtattccaatataccaaatctgcccaaagcgccagccagcttcctcaagccttgcggtcagataaggccctgtacctagctagttgccgctgctcccggcgctgggccaagccgtcggacgtccgtcccccctctttccccctcctctcccctctccactggtggaacgatgtctggctgttgccatcgttctcagaagcaacgccccctggatcgggtggctgtcgtactattgcatgttcgtccgcgctactaggaaagtttttttcccacccggagtatccgtgtttagtccgcgggctggctgaccggctagctggccgtgccagttgggtaaggttccaagggaggaccttactaggtagaaacgggatccaacaatgaggggaaaagggcggatatggcttgccgggggttcattgcggcctggacgaagaaagggagatgatcactaatgcaacacaatcttggcttgcaaggaattgcgctccaaccagaatgtctctgcgtagggatgccaattcgtgcgggccatgctggatggatagtacgctgctccactctcgctcgaccttttgcagtccacaatcgtttccccgtatcgttgggcgggggcgtttttctgcagctatggttgctgctgccccgacggtgaacctttctgcatccccggttttagtcgattttagttggcgggcctggagattaaactccgtcggacgaagaggagcagtggtgtcatcgtcggcggattgcatgctatcggaagagcatggaagagggaaaacatcaacttcatttgcaaaacgctcgagcataaatagaggcctggattccgccgttctggtgtcttttcttcttcatccagcatcgcaagtctctcaagcatcgcctggttcgttcttctcactcttccaccaccagccttgtcaataagttagctcttcatcttttcgaagaaaccaattctccaaacgtcaaaatgaagttctctaccatccttaccggctccctcttcgccactgccgctctggctgctcctctcactgagaagcgccgtgctcgcaaggaggcccgcgccgctggcaagcgccacagcaaccctccctacatccctggttccgacaaggagatcctcaagctgaacggcacctccaacgaggattacagctccaactgggctggtgccgtcctgatcggcgacggctacaccaaggtcactggcgagttcactgtccccagtgtctctgctggatctagcagctccagtggctacggcggtggctacggctactacaagaacaagagacaatccgaggagtactgcgcctccgcttgggttggtatcgacggtgacacctgcgagaccgctattctccagactggtgtcgacttctgctacgaggatggccagacttcctacgatgcctggtacgagtggtaccccgactacgcctacgacttcaacgacatcaccatctccgagggtgacaccatcaaggtcactgtcgaggccaccagcaagagcagcggtagcgccaccgttgagaacctgaccactggccagtccgtcacccacaccttcagcggcaacgtcgagggtgacctttgcgagaccaacgccgagtggatcgtcgaggacttcgagtctggtgactctcttgtggctttcgctgacttcggctccgttaccttcaccaatgctgaggctaccagcgacggttccactgtcggcccctctgacgctaccgttatggacattgagcaggatggcaccgtcctcaccgagacctccgtctctggcgacagcgtcactgtcacctacgtttaa

SEQ ID NO: 30 - DNA, 849 bp, Aspergillus niger
  CDS (1)..(849)
atgaagttctctaccatccttaccggctccctcttcgccactgccgctctggctgctcctctcactgagaagcgccgtgctcgcaaggaggcccgcgccgctggcaagcgccacagcaaccctccctacatccctggttccgacaaggagatcctcaagctgaacggcacctccaacgaggattacagctccaactgggctggtgccgtcctgatcggcgacggctacaccaaggtcactggcgagttcactgtccccagtgtctctgctggatctagcagctccagtggctacggcggtggctacggctactacaagaacaagagacaatccgaggagtactgcgcctccgcttgggttggtatcgacggtgacacctgcgagaccgctattctccagactggtgtcgacttctgctacgaggatggccagacttcctacgatgcctggtacgagtggtaccccgactacgcctacgacttcaacgacatcaccatctccgagggtgacaccatcaaggtcactgtcgaggccaccagcaagagcagcggtagcgccaccgttgagaacctgaccactggccagtccgtcacccacaccttcagcggcaacgtcgagggtgacctttgcgagaccaacgccgagtggatcgtcgaggacttcgagtctggtgactctcttgtggctttcgctgacttcggctccgttaccttcaccaatgctgaggctaccagcgacggttccactgtcggcccctctgacgctaccgttatggacattgagcaggatggcaccgtcctcaccgagacctccgtctctggcgacagcgtcactgtcacctacgtttaa

SEQ ID NO: 31 - protein, 282 aa, Aspergillus niger
MKFSTILTGSLFATAALAAPLTEKRRARKEARAAGKRHSNPPYIPGSDKEILKLNGTSNEDYSSNWAGAVLIGDGYTKVTGEFTVPSVSAGSSSSSGYGGGYGYYKNKRQSEEYCASAWVGIDGDTCETAILQTGVDFCYEDGQTSYDAWYEWYPDYAYDFNDITISEGDTIKVTVEATSKSSGSATVENLTTGQSVTHTFSGNVEGDLCETNAEWIVEDFESGDSLVAFADFGSVTFTNAEATSDGSTVGPSDATVMDIEQDGTVLTETSVSGDSVTVTYV

SEQ ID NO: 32 - DNA, 3201 bp, Aspergillus niger
atgtgatctatctagctgaccgattattcttccgtagaaacaccgcatgcaccggaagctacgacacggtgggataccggagcgactgctatcagaatagccggttctttcagaactttggtacgataagtggaagcatttattgctatccttcttaggggacgatgggcggtcgagacttgtctgaagagtctgtggatggactgtacgcaatactattatgactgtgggggcatgcttatctaggtagcgaatgaaattgacttgctattgctgagcagtataaatgcgacataaattagtgatgagacaagacagatttggggaaattggcagctactcttccagcgtgattaaatttcccccaattcgggcaaggcagctgctactgctattcgattattctgagcatgtagcctagtatcggcaattcccgacaatagattgggcaccccacgttgagcgaaggccatcaacagcggtaagctgaagcgattgttggggaaagggacgcagccgagagaagccgcgagaattctccgctggtaacctgagttcagacccacggcgccagaaagcgactattggatgcgacggtacagtagtgggttttagtttggatgtatctggagacatcgatgcttgttcgccggcgctaatttggggccatcgcttagggaagaaaaagaaaggaaggatttcatctgccgcggcatttttggtcaggcattggcaatactccaagcagcttgccaaagtgagaaatgtgcttatgaataatattgagtaatagttaatcaattgtcttacaggataatatgggaatagcattggcattgcgtggttggcaggcagcatgttgcaaattgcaacaacgcgatcccggcgatcgccgtcggactccgggtgggaatcagggttggagacccattgcttatcaacaacagccgacgccagtcgttctggggtgcatttgcagaatctttggacgaatcagccttttgtcagtatcggccggtccgaattgacccagcttgctagccgttggagacatgcaatgatgccattgtctcgtccgataagcaagtgcggccaatccctcgttccttctggctgtctcagaaaagttataatgtccgtctcgcctgcctagcgaacaattcgaactctgtgtgtgttgtccctctcaaggtctccagcatgcgttcttccggtctctacacagcactcctgtgctccctggccgcctcgaccaacgcgattgtccatgaaaagctcgccgcggtcccctccggctggcatcatgtcgaagatgctggctccgaccaccagataagcttgtcgatcgcgctggcacgcaagaacctcgatcagcttgaatccaagctgaaagacttgtcaacacctggcgaatcgcaatacggccagtggctggaccaggaggatgtcgacacgctgttcccggtggccagcgacaaggctgtgattaactggctgcgcagcgccaacatcacccatatttcccgccagggcagcttggtgaactttgcgaccacggtcgataaggtgaacaagcttctcaacgccacctttgcctactaccaaagcggctcttcccagagattgcgcacaacagagtactccatcccggatgatctggtcgactcaatcgacctcatctccccaacgaccttcttcggcaaggaaaagaccactgctggtctgaaccagcgggcgcaaaagattgacacccatgtggccaaacgctccaacagctcgtcctgtgccgatgtcatcacgctgtcctgcctgaaggagatgtacaattttggcaactacactcccagcgcctcgtcgggcagcaagctgggcttcggcagcttcctgaacgaatccgcctcgtattctgaccttgccaagttcgagaagctgtttaacctgccctcccagagcttttccgtggagttggtcaacggcggtgtcaatgatcagaatcaatcgacggcttccttgaccgaggcggacctcgatgtggaattgctcgtcggagttgctcatcccctcccggtgactgagttcatcacttctggcgaaccgtgagtattgaattcctagacagagcttgaatcgaagctaattgtgtagtcctttcattcccgaccccgatgagccgagtgccgccgacaacgagaacgagccttacctccagtactatgagtaccttctctccaagcccaactcggctctgccccaagtgatttccaactcctatggtgacgacgaacaggtacgaccccacattcccccttccctgtatgtagatactaaccggaccagaccgttccagagtactacgccaagcgagtctgcaacctgatcggacttgttggcctgcgcggcatcagtgtcctcgagtcgtccggtgacgaaggtacacttacttcccctgtcctattccttgcatcgaaaataccctaacagcagcacaggtatcggatctggctgccgaaccaccgacggcaccaaccgaacccaattcaaccccatcttcccggccacctgtccctacgtgactgccgtgggaggaacaatgtcctatgcccccgaaatcgcctgggaagccagttccggcggattcagcaactacttcgagcgggcgtggttccagaaggaagctgtgcagaactacctggcgcaccacatcaccaacgagaccaagcagtactactcgcaattcgccaactttagcggtcgcggatttcctgacgttgctgcccatagctttgagccttcgtgagtccattcccagcatcatgataatacgaaatagggtctaatgacatctgcagatatgaggttatcttctacggcgcccgctacggctccggcggtacctcagccgcgtgtccccttttctctgcgctagtgggcatgctgaacgatgctcgtctgcgggcgggcaagtccacgctgggtttcttgaaccccctgctctatagcaaggggtacagagcgttgactgatgtgacggggggccagtcgatcggatgcaatggcattgatccgcagaatgatgagactgttgccggcgcgggcattatcccgtgggcgcactggaatgccacggtcggatgggatccggtgactggattgggacttcctgactttgagaagttgaggcagttggtgctgtcgttgtag

SEQ ID NO: 33 - DNA, 1788 bp, Aspergillus niger
  CDS (1)..(1788)
atgcgttcttccggtctctacacagcactcctgtgctccctggccgcctcgaccaacgcgattgtccatgaaaagctcgccgcggtcccctccggctggcatcatgtcgaagatgctggctccgaccaccagataagcttgtcgatcgcgctggcacgcaagaacctcgatcagcttgaatccaagctgaaagacttgtcaacacctggcgaatcgcaatacggccagtggctggaccaggaggatgtcgacacgctgttcccggtggccagcgacaaggctgtgattaactggctgcgcagcgccaacatcacccatatttcccgccagggcagcttggtgaactttgcgaccacggtcgataaggtgaacaagcttctcaacgccacctttgcctactaccaaagcggctcttcccagagattgcgcacaacagagtactccatcccggatgatctggtcgactcaatcgacctcatctccccaacgaccttcttcggcaaggaaaagaccactgctggtctgaaccagcgggcgcaaaagattgacacccatgtggccaaacgctccaacagctcgtcctgtgccgatgtcatcacgctgtcctgcctgaaggagatgtacaattttggcaactacactcccagcgcctcgtcgggcagcaagctgggcttcggcagcttcctgaacgaatccgcctcgtattctgaccttgccaagttcgagaagctgtttaacctgccctcccagagcttttccgtggagttggtcaacggcggtgtcaatgatcagaatcaatcgacggcttccttgaccgaggcggacctcgatgtggaattgctcgtcggagttgctcatcccctcccggtgactgagttcatcacttctggcgaacctcctttcattcccgaccccgatgagccgagtgccgccgacaacgagaacgagccttacctccagtactatgagtaccttctctccaagcccaactcggctctgccccaagtgatttccaactcctatggtgacgacgaacagaccgttccagagtactacgccaagcgagtctgcaacctgatcggacttgttggcctgcgcggcatcagtgtcctcgagtcgtccggtgacgaaggtatcggatctggctgccgaaccaccgacggcaccaaccgaacccaattcaaccccatcttcccggccacctgtccctacgtgactgccgtgggaggaacaatgtcctatgcccccgaaatcgcctgggaagccagttccggcggattcagcaactacttcgagcgggcgtggttccagaaggaagctgtgcagaactacctggcgcaccacatcaccaacgagaccaagcagtactactcgcaattcgccaactttagcggtcgcggatttcctgacgttgctgcccatagctttgagccttcatatgaggttatcttctacggcgcccgctacggctccggcggtacctcagccgcgtgtccccttttctctgcgctagtgggcatgctgaacgatgctcgtctgcgggcgggcaagtccacgctgggtttcttgaaccccctgctctatagcaaggggtacagagcgttgactgatgtgacggggggccagtcgatcggatgcaatggcattgatccgcagaatgatgagactgttgccggcgcgggcattatcccgtgggcgcactggaatgccacggtcggatgggatccggtgactggattgggacttcctgactttgagaagttgaggcagttggtgctgtcgttgtag

SEQ ID NO: 34 - protein, 595 aa, Aspergillus niger
MRSSGLYTALLCSLAASTNAIVHEKLAAVPSGWHHVEDAGSDHQISLSIALARKNLDQLESKLKDLSTPGESQYGQWLDQEDVDTLFPVASDKAVINWLRSANITHISRQGSLVNFATTVDKVNKLLNATFAYYQSGSSQRLRTTEYSIPDDLVDSIDLISPTTFFGKEKTTAGLNQRAQKIDTHVAKRSNSSSCADVITLSCLKEMYNFGNYTPSASSGSKLGFGSFLNESASYSDLAKFEKLFNLPSQSFSVELVNGGVNDQNQSTASLTEADLDVELLVGVAHPLPVTEFITSGEPPFIPDPDEPSAADNENEPYLQYYEYLLSKPNSALPQVISNSYGDDEQTVPEYYAKRVCNLIGLVGLRGISVLESSGDEGIGSGCRTTDGTNRTQFNPIFPATCPYVTAVGGTMSYAPEIAWEASSGGFSNYFERAWFQKEAVQNYLAHHITNETKQYYSQFANFSGRGFPDVAAHSFEPSYEVIFYGARYGSGGTSAACPLFSALVGMLNDARLRAGKSTLGFLNPLLYSKGYRALTDVTGGQSIGCNGIDPQNDETVAGAGIIPWAHWNATVGWDPVTGLGLPDFEKLRQLVLSL

SEQ ID NO: 35 - DNA, 3027 bp, Aspergillus niger
gcagacatcaatttcacaagcattacgaacatcccctggaaatatcaaatgtctctcggttaattactgcatgcaggcctctctatcacatctctagaggaatggttctgcgtcacagtgctccgtgactgccccggatcagtacaagtcctgcctcccaagatgtttcagacagctacaatctacagcgacatcagagaatacagccggtggttaccaacttctacagaatctgcatagaagtatttttgccttactagctaagcttatgggtgtgctcttacagtatgcgctcgaagttgcctggatccaacctgttctgactatttgtcggagaattgttcatatagtgcgttggagaccattgttgttccccattcttcgactgcctagctcgtgtgctatggagtgctgaagcttatagttgagacaaggttccacatacattaggttctcggccggtgattggtacgctcatgggccacgggttgtctcggtggtccgcggatgcagcccaaccctaagggaccgacaacgaagaagggacgggatgatcttgaacttttcagtatcggcaggatgccattgcaaagccgacgcgaagcgtggttgtggcgtcataacaatatggaagtggagggagcctgcgtcggttacatggtatccctgcatgttcccctgagtggcttcagcacatcatcatttgccatgataatggccagtcaattcgacgtcgtcctgagcaagcagctaccggtaatctgagacctaatcctggtaagtggatcgagttcatttacctcatcatctaacctcgcttcatgattcgcaggcgctttccgcgactagtcgatgccagtatccatttgcctgcagatccgatgcttccaccgaccaccgttacttctctccagacccccatccggctttccgacggcctcctctgcatcccctcacaaagcaagcggagacctgcctgaatagggagagttttttcaatgagcccacacgcagttacctcgcttccgcatgagatgggtccattcttgacaatgctgcctaatgcgcagaagggccgtcatgcgcctggagaactacataaatagggaccacgcatgccccgacgatgtatgaattgttcaaacttctccgcccaagtgagttctcttttcattccattccgaagggagaatcaccagtatgcgggttaccacggcaattgcttcattactactggtcggctcggccaccagtctccaaaatcctcatcgtcgggctgttccgccccctctctcgcatcgcagcgtagcgtctcgctccgtgcccgttgagcgccgaaccaccgactttgagtatttgactaacaagactgcaagtgcgtgattccgttttttaactaccgcatttatcgttctaagatcaattgcaggattcctggtcaatggcacaagcatccccgaagtcgatttcgacgtcggcgagtcctacgccggccttctccccaatacgcccactggcaattctagcctattcttctggttcttcccctcgcaaaatccagaggccagcgatgaggttagtggtcgctctgttttttccggtcatgcgtcagccagctaacaattaacaaagatcaccatctggctcaacggcggccccggatgtagctccctagacggcctgcttcaagagaacggcccattcctctggcagcctggcacttacaagcccgttcctaatccatactcatggaccaacctcaccaatgtggtttacatcgaccaacccgccggcacaggcttctccccgggcccctcgaccgtaaataacgaggaagacgtggctgcccagttcaacagctggttcaagcacttcgtcgacaccttcgacctgcacggccgcaaggtctacatcaccggtgaaagctacgcgggcatgtacgtcccctacattgccgatgccatgctgaacgaggaggatacaacctacttcaacttgaagggtatccagatcaacgacccgtccatcaacagcgactcggtcatgatgtactgtatgtttcccttcatatacctccacctccaccaccaccaccactaacaacatcacccaccagcccccgccgtccgccatctgaaccactacaacaacatcttccagctaaactccactttcctctcctacatcaacgccaaagccgacaagtgcggctacaacgccttcctcgacaaagccatcacctacccaccccccagtcccttccccaccgcccctgaaatcaccgaagactgccaagtctgggacgaagtcgtcatggccgcctacgacatcaacccctgcttcaattactaccacctgatcgacttctgcccctacctctgggacgtgctcggcttcccctccctcgcctccggcccaaacaactacttcaaccgctccgacgtccagaagatcctgcacgtccctccaacggactactccgtgtgctcggagaccgtcatcttcgcgaacggcgacggcagcgaccccagctcctggggtcccctacccagcgtcatcgaacgcactaacaacactatcatcggccacggctggctcgattacctcctcttcttgaacggctcgctcgccacaatccagaacatgacctggaacggtaagcaagggttccagcgtcctcccgtggaaccgctcttcgtcccttaccattatggtctggctgagctgtactggggcgatgagcctgacccgtataaccttgatgctggcgctggatacctgggtacagcgcataccgagcgcgggttgactttcagctcggtgtatttgtctggtcatggtaagtttattatatccccttggaagcggtatgatgaacgttagagagtgctgactgttgcttcctcctcgtgatagaaatcccgcagtatgttcctggtgcggcttaccgccagttggagttcctgctcggtaggattagtagtctttcggcgaaggggaactatacctcttgatttcagcggatga

SEQ ID NO: 36 - DNA, 1576 bp, Aspergillus niger
  CDS (1)..(1572)
atgcgggttaccacggcaattgcttcattactactggtcggctcggccaccagtctccaaaatcctcatcgtcgggctgttccgccccctctctcgcatcgcagcgtagcgtctcgctccgtgcccgttgagcgccgaaccaccgactttgagtatttgactaacaagactgcaagattcctggtcaatggcacaagcatccccgaagtcgatttcgacgtcggcgagtcctacgccggccttctccccaatacgcccactggcaattctagcctattcttctggttcttcccctcgcaaaatccagaggccagcgatgagatcaccatctggctcaacggcggccccggatgtagctccctagacggcctgcttcaagagaacggcccattcctctggcagcctggcacttacaagcccgttcctaatccatactcatggaccaacctcaccaatgtggtttacatcgaccaacccgccggcacaggcttctccccgggcccctcgaccgtaaataacgaggaagacgtggctgcccagttcaacagctggttcaagcacttcgtcgacaccttcgacctgcacggccgcaaggtctacatcaccggtgaaagctacgcgggcatgtacgtcccctacattgccgatgccatgctgaacgaggaggatacaacctacttcaacttgaagggtatccagatcaacgacccgtccatcaacagcgactcggtcatgatgtactcccccgccgtccgccatctgaaccactacaacaacatcttccagctaaactccactttcctctcctacatcaacgccaaagccgacaagtgcggctacaacgccttcctcgacaaagccatcacctacccaccccccagtcccttccccaccgcccctgaaatcaccgaagactgccaagtctgggacgaagtcgtcatggccgcctacgacatcaacccctgcttcaattactaccacctgatcgacttctgcccctacctctgggacgtgctcggcttcccctccctcgcctccggcccaaacaactacttcaaccgctccgacgtccagaagatcctgcacgtccctccaacggactactccgtgtgctcggagaccgtcatcttcgcgaacggcgacggcagcgaccccagctcctggggtcccctacccagcgtcatcgaacgcactaacaacactatcatcggccacggctggctcgattacctcctcttcttgaacggctcgctcgccacaatccagaacatgacctggaacggtaagcaagggttccagcgtcctcccgtggaaccgctcttcgtcccttaccattatggtctggctgagctgtactggggcgatgagcctgacccgtataaccttgatgctggcgctggatacctgggtacagcgcataccgagcgcgggttgactttcagctcggtgtatttgtctggtcatgaaatcccgcagtatgttcctggtgcggcttaccgccagttggagttcctgctcggtaggattagtagtctttcggcgaaggggaactatacctcttgatttcagcggatga

SEQ ID NO: 37 - protein, 524 aa, Aspergillus niger
MRVTTAIASLLLVGSATSLQNPHRRAVPPPLSHRSVASRSVPVERRTTDFEYLTNKTARFLVNGTSIPEVDFDVGESYAGLLPNTPTGNSSLFFWFFPSQNPEASDEITIWLNGGPGCSSLDGLLQENGPFLWQPGTYKPVPNPYSWTNLTNVVYIDQPAGTGFSPGPSTVNNEEDVAAQFNSWFKHFVDTFDLHGRKVYITGESYAGMYVPYIADAMLNEEDTTYFNLKGIQINDPSINSDSVMMYSPAVRHLNHYNNIFQLNSTFLSYINAKADKCGYNAFLDKAITYPPPSPFPTAPEITEDCQVWDEVVMAAYDINPCFNYYHLIDFCPYLWDVLGFPSLASGPNNYFNRSDVQKILHVPPTDYSVCSETVIFANGDGSDPSSWGPLPSVIERTNNTIIGHGWLDYLLFLNGSLATIQNMTWNGKQGFQRPPVEPLFVPYHYGLAELYWGDEPDPYNLDAGAGYLGTAHTERGLTFSSVYLSGHEIPQYVPGALTASWSSCSVGLVVFRRRGTIPLDFSG

SEQ ID NO: 38 - DNA, 3399 bp, Aspergillus niger
cctgccgccgatcggtggagtagacgaggaggagggcaagagcttggaagaggagatgacgattctcagcgagtctaagcggcaggagctgacggtgcggttcaagaaggctgcggatggagtgtacgtggaggccaagcgcagcgccatcggcggcatgacgcaggtgcccctgtacttttatggcattcttctggcgcttggctggaacgagattgtggctggtaagtttcgcactatgaatttcgggttctgggttgatcatggctaactgtgcacagttcttcgtaaccctgcctacttcttcctcttgtttgtgtgcctcgttgcagggtacgtgacgtaccagctcaatctgtggggaccgatcatgaagatgacggaggctgcatcgaaccaggcactcgtggagggtaagaagcgactgcgcgagtttctcgagtcttcggatacgggacgacaggcaattgcgatgtcgacggccggcggtgctggccggggggagcaggtggagatgtcgcgcctcaacaagcagggaaagacaacggccgaggatgaggacggtgacttgtaagagaggcagaaggagtcatttatcacttgtattccaatgtattttccatttatagatactgcattcaaatgcaccgtttagcatagcatcccacattctatttcattccaatctcatgccattgccatccccggtattaatttacttctccgccttatcttgcaatcttgcaatctctttctcctcgttatcacgcgttcctgcaggcgcacctccgatggcactgcagccggagtccccgcggcgccggcactactaaagactaaagtgtctagtctagcctccaatgtgctcacctccatcagcatctcatccatttatcttctgacgatgtcatctgcaggctccaccccctccggccgccccgacgctctccgacggtgcacaacaatcaattctgcagtcacgctcaagattcgtccctgccggactcctcatgccgtgcctggtttaatctatgcaatggagtaaggtagtatcgcctagcaggagcggagttcctgctgcgctcacgccatggtgccggcgcagacataaatcgctcgtttcctccggcgctggccgttctctcgagccagtttgtctgttgtggttgtaggatcctctgttcccctcgacagctcacaatgcgttccttctccgttgtcgctgccgcgtcactggcgctctcttgggcgtctctggcccaggctgctcgcccccgtcttgtgcccaagcctatctctcggccagcttcgagtaagtcggctgcgactacgggtgaggcttattttgagcagctgctggaccatcacaacccggagaagggaacgttttcccagcggtactggtggagtactgaatactggggtggacctgggtcaccggtgcgtctctgacatttggtcttatgaccggccatattgaaacttagccggtggcaaggtccgcaatcatgaggaacattgctgattaaactaggtggtcctctttaaccctggagaggtctctgccgatggctatgaggggtatctcaccaacgatactctcactggtgtctatgcgcaggagatccagggtgccgtcattctcattgaacgtgagtgtcactgctaccatggaaaaaagacattcgctgatcgaccccaatctagaccgctactggggcgactcttcgccttatgaggtgctcaatgccgaaacacttcagtatctcacactggatcagtccattctggacatgacctacttcgccgagacggtaaagctgcagttcgataatagcagccgcagcaatgcgcagaatgctgtatgttaccttcaccgctctatgtttctgataggtactgacaacgtagccctgggtcatggtcggtggctcatacagcggtgccttgacggcttggaccgagtctatcgcgcctggaacgttctgggcttaccatgccaccagtgcgcctgtggaggctatctatgactttgtaggtgtagcctgctcttgttatctatacttgcagctaaccaagccagtggcaatacttctaccccattcagcaaggtatggcacagaactgcagcaaggatgtgtctctggtagccgagtatgtcgacaaaattgggaagaatggaactgccaaggaacagcaggagctcaaagaattgtttggtctgggagctgttgagcattacgatgactttgccgcgtgagtacttcaaagtctatagacgagcttttctgacaggaacagtgtcctgcccaacggaccgtacctctggcaagacaacgactttgtcacaggatactcttccttcttccagttctgtgatgctgtcgaggtgagttaccaccagattcctcttgattgaagcaatatactaacggacacagggtgtcgaagccggcgcggcagtgacccccggccccgagggcgtcggacttgaaaaggccctggccaactacgcaaactggttcaattcaaccatactccctaactgtatttcaccatctcttgtctcgttcctctcccttatcctcccagactaacctagtgacagactgcgcaagctacggctactggaccgacgaatggagcgtcgcctgtttcgacagctataatgcctcgagccccatcttcaccgacacctccgtgggtaaccctgtcgaccgccaatgggaatggttcctctgcaacgagcctttcttctggtggcaggagtgcgtaccccttacctcattcatgataacacacgaacaattccactaacaaagatccagcggtgcccccgagggaacctccactattgtgccccggctcgtcagcgcctcctactggcaacgccaatgcccgctctacttccccgaagttaacggctacacgtacggcagcgcgaagggtaaaaactccgctacggtgaacagctggacgggtggatgggatatgacccgcaacacgacgcggttgatctggacgaacgggtaggtctccccctaatttccgttgaatgtgatgtgaagataaactcaatgctaataaattgagaaggcaatatgacccctggcgcgactccggtgtgtcgagcactttccggcccggtggtccgctggttagcacggcgaacgaacccgtgcagattattccgggcgggttccattgctcggacttgtatatggaggattactatgcgaatgagggtgtgaggaaggtggttgataatgaggtgaagcagattaaggagtgggtggaggagtattatgcttgatgaagatactggtggacatatggagtgtacataagatgaatggtcataaaatgatgatggtagatacggctatggctgttgattag

SEQ ID NO: 39 - DNA, 1536 bp, Aspergillus niger
  CDS (1)..(1536)
atgcgttccttctccgttgtcgctgccgcgtcactggcgctctcttgggcgtctctggcccaggctgctcgcccccgtcttgtgcccaagcctatctctcggccagcttcgagtaagtcggctgcgactacgggtgaggcttattttgagcagctgctggaccatcacaacccggagaagggaacgttttcccagcggtactggtggagtactgaatactggggtggacctgggtcaccggtggtcctctttaaccctggagaggtctctgccgatggctatgaggggtatctcaccaacgatactctcactggtgtctatgcgcaggagatccagggtgccgtcattctcattgaacaccgctactggggcgactcttcgccttatgaggtgctcaatgccgaaacacttcagtatctcacactggatcagtccattctggacatgacctacttcgccgagacggtaaagctgcagttcgataatagcagccgcagcaatgcgcagaatgctccctgggtcatggtcggtggctcatacagcggtgccttgacggcttggaccgagtctatcgcgcctggaacgttctgggcttaccatgccaccagtgcgcctgtggaggctatctatgacttttggcaatacttctaccccattcagcaaggtatggcacagaactgcagcaaggatgtgtctctggtagccgagtatgtcgacaaaattgggaagaatggaactgccaaggaacagcaggagctcaaagaattgtttggtctgggagctgttgagcattacgatgactttgccgctgtcctgcccaacggaccgtacctctggcaagacaacgactttgtcacaggatactcttccttcttccagttctgtgatgctgtcgagggtgtcgaagccggcgcggcagtgacccccggccccgagggcgtcggacttgaaaaggccctggccaactacgcaaactggttcaattcaaccatactccctaactactgcgcaagctacggctactggaccgacgaatggagcgtcgcctgtttcgacagctataatgcctcgagccccatcttcaccgacacctccgtgggtaaccctgtcgaccgccaatgggaatggttcctctgcaacgagcctttcttctggtggcaggacggtgcccccgagggaacctccactattgtgccccggctcgtcagcgcctcctactggcaacgccaatgcccgctctacttccccgaagttaacggctacacgtacggcagcgcgaagggtaaaaactccgctacggtgaacagctggacgggtggatgggatatgacccgcaacacgacgcggttgatctggacgaacgggcaatatgacccctggcgcgactccggtgtgtcgagcactttccggcccggtggtccgctggttagcacggcgaacgaacccgtgcagattattccgggcgggttccattgctcggacttgtatatggaggattactatgcgaatgaggatacggctatggctgttgattag

SEQ ID NO: 40 - protein, 511 aa, Aspergillus niger
MRSFSVVAAASLALSWASLAQAARPRLVPKPISRPASSKSAATTGEAYFEQLLDHHNPEKGTFSQRYWWSTEYWGGPGSPVVLFNPGEVSADGYEGYLTNDTLTGVYAQEIQGAVILIEHRYWGDSSPYEVLNAETLQYLTLDQSILDMTYFAETVKLQFDNSSRSNAQNAPWVMVGGSYSGALTAWTESIAPGTFWAYHATSAPVEAIYDFWQYFYPIQQGMAQNCSKDVSLVAEYVDKIGKNGTAKEQQELKELFGLGAVEHYDDFAAVLPNGPYLWQDNDFVTGYSSFFQFCDAVEGVEAGAAVTPGPEGVGLEKALANYANWFNSTILPNYCASYGYWTDEWSVACFDSYNASSPIFTDTSVGNPVDRQWEWFLCNEPFFWWQDGAPEGTSTIVPRLVSASYWQRQCPLYFPEVNGYTYGSAKGKNSATVNSWTGGWDMTRNTTRLIWTNGQYDPWRDSGVSSTFRPGGPLVSTANEPVQIIPGGFHCSDLYMEDYYANEDTAMAVD

SEQ ID NO: 41 - DNA, 3009 bp, Aspergillus niger
atggtctcctgcggacctacgtgaaccatccagccatctggtgccacacaatcggcgatctatcatatcagaaaggcgccttgttggagccactaagtgtcgcactcaccgcagttactcgatctggggtcagaattggagatccggttttgatttgtggcgcgggaccgattgggttggtggtgctgcaatgctgccgcgctgctggggcgtatcccactgtgatcagcgatgttaacccggcgcggttgcaatttgcgcgacagttcgtgcctgctgctcgaacactgcaggttcggccggaggagaccgacaaggaatttgcagctcgggtggtgcagttgatgggtggggaggattgcgagcccgtggttgccctggaatgcacgggagtcgaaagttcgatcgccggtgctattcagagtgtcaagtttgggggcaaagtgtttgtggttggcgtgggcaaggataagcttcagtttccattcatgcgactgagcgagcgcgagatcgatctgcagttccagcagcgctatgtcaacatgtggccccgcgccatccgggtgatgtccagcggagccatcgatctagaccagatgatcactcatgtctatgcctttgaagacgctctcaaggcgtttcagacggcgtcagatccgagtagcggctcaattaaggtgctgattgaggggccacaaggatgagagatggcggatattggacagtgaagccatgactgttataaggtatagcagaacagaacatgtatcttgtcaacgaattgattgatttcagcacggaaatgttcaaggcatggaacaattgcttctgacccggaaccgcggattgcaaggatggatatgtggatcagatggtgtgaagaagatctgtctgttagcatacttcataagttccaaggaggagtaaatgtggagtcataagagtaatatcgaatatcatagaatggggttgtcttgctaacggtgaatcggactccgtcggctctgccagcgatcggcaggtcacgcgtctgcgtaacttggtacttatcttcccagtcacctaagcactgttactccactcttctctctttgacgataagaagatagcagagactcttgataaaaagggttgggagcatgctttgaatttcttcactccgagagctttctgtccccatctggtctcttgttgtccccgatgtactactctctctgggttgctgccttggtggccgcgctgcccgtctcccgggcccagtttgtggctccgcccacggatctcattcccaccaagggatatctcgacatccccgtccgctacaaacaggtccccaccggcatttgtgagactgatcccagtgtcaagagcttctccggttacgtcgatgtcgctgagcatgagcacatcttcttctggttcttcgaggcgcgcaaccaagatcccaccgaggctcccttgaccgtctggatcaatggaggcatgtctgaccccggtcattatttccttccaattgctaaccgttcgtaggtcctggttcctcctccatgatcggcttgttccaagagcacggcccatgcggcattgacgccaatggctccgtctacaacaacccctactcctggaacaacgccagcaacatgctctacatcgaccagcccgtgcagaccggcttctcctacagcattccggttcccggctatgtggattcttccacagacaatgttattgctctgccctcccccgcctgccccgactatgcagcggatatgttctgtggcacttactcctaccccaacgtgagccttacggctaattccaccgacaacgccgcccccaacttctaccgcgccctacagggttttatgggcgcatttcctcagtactcgcgcgaaaccttccacttcaccacggagagttatggcggccactacgggcccgtcttcaacgagtacatcgaggagcagaacgcccatctccagccgggagccaagaagatccaactgggcagtgtgatgatcggcaatggctggtatgacccgattattcaataccaggcctactacaactttacggtacactacctggtttctgatccttatccttacagcctggacactaatctatctacaggtatatccgggcaacacatacgactacctgccattcaacaagtccatcagctcgctgatgtacaacaacctctatggccccggaaactgcctcgaccagctctacgactgcgccgcccgaggcatcgacgagatctgcagcactgccgacgatttttgcgccaacgaggtcgaaaacgtctacgacatttactccggtcgggatgagtatgactttcgtgaactcactccggacccgttcccttacgagttctacgttgactacctgaacaaagcgtccgtgcaggccgccatcggcgcatacatcaattacacggagagcaacaacgctgttggactcgccttttcgtccaccggtgacgacgggcgactcatgaacaccatccaggatgtgggcaagctgctcaaacagggtgtcacggtggtcatgtacgccggggatgccgactataactgcaactggctgggtggggaagccgtgtcgttgcaggtcaaggccgccaacttcagtagtgcgggttacaccaacattgtcacctcggatggagtgacacacggccaggtgcgccaggcggggcaatttgcctttgtgcgagtgtatgagagtggacatgaggttcccttctatcaacccttgcttgcgctggagatgtttgagcgcgtcattggcggcaaggatgtggcgacgggaaagattcccatctcgtcgagtttacagacggtgggcacgcccaagagttactaccgggagggcaacagcacgattcagtgggaggtgttggattctctggcgacgtacaacacaaccacgaatgctccgaacccggtgagccggaggctgaagcggatgggaccagctttgcggtttcagatgtag

SEQ ID NO: 42 - DNA, 1701 bp, Aspergillus niger
  CDS (1)..(1701)
atgtactactctctctgggttgctgccttggtggccgcgctgcccgtctcccgggcccagtttgtggctccgcccacggatctcattcccaccaagggatatctcgacatccccgtccgctacaaacaggtccccaccggcatttgtgagactgatcccagtgtcaagagcttctccggttacgtcgatgtcgctgagcatgagcacatcttcttctggttcttcgaggcgcgcaaccaagatcccaccgaggctcccttgaccgtctggatcaatggaggtcctggttcctcctccatgatcggcttgttccaagagcacggcccatgcggcattgacgccaatggctccgtctacaacaacccctactcctggaacaacgccagcaacatgctctacatcgaccagcccgtgcagaccggcttctcctacagcattccggttcccggctatgtggattcttccacagacaatgttattgctctgccctcccccgcctgccccgactatgcagcggatatgttctgtggcacttactcctaccccaacgtgagccttacggctaattccaccgacaacgccgcccccaacttctaccgcgccctacagggttttatgggcgcatttcctcagtactcgcgcgaaaccttccacttcaccacggagagttatggcggccactacgggcccgtcttcaacgagtacatcgaggagcagaacgcccatctccagccgggagccaagaagatccaactgggcagtgtgatgatcggcaatggctggtatgacccgattattcaataccaggcctactacaactttacggtatatccgggcaacacatacgactacctgccattcaacaagtccatcagctcgctgatgtacaacaacctctatggccccggaaactgcctcgaccagctctacgactgcgccgcccgaggcatcgacgagatctgcagcactgccgacgatttttgcgccaacgaggtcgaaaacgtctacgacatttactccggtcgggatgagtatgactttcgtgaactcactccggacccgttcccttacgagttctacgttgactacctgaacaaagcgtccgtgcaggccgccatcggcgcatacatcaattacacggagagcaacaacgctgttggactcgccttttcgtccaccggtgacgacgggcgactcatgaacaccatccaggatgtgggcaagctgctcaaacagggtgtcacggtggtcatgtacgccggggatgccgactataactgcaactggctgggtggggaagccgtgtcgttgcaggtcaaggccgccaacttcagtagtgcgggttacaccaacattgtcacctcggatggagtgacacacggccaggtgcgccaggcggggcaatttgcctttgtgcgagtgtatgagagtggacatgaggttcccttctatcaacccttgcttgcgctggagatgtttgagcgcgtcattggcggcaaggatgtggcgacgggaaagattcccatctcgtcgagtttacagacggtgggcacgcccaagagttactaccgggagggcaacagcacgattcagtgggaggtgttggattctctggcgacgtacaacacaaccacgaatgctccgaacccggtgagccggaggctgaagcggatgggaccagctttgcggtttcagatgtag

SEQ ID NO: 43 - protein, 566 aa, Aspergillus niger
MYYSLWVAALVAALPVSRAQFVAPPTDLIPTKGYLDIPVRYKQVPTGICETDPSVKSFSGYVDVAEHEHIFFWFFEARNQDPTEAPLTVWINGGPGSSSMIGLFQEHGPCGIDANGSVYNNPYSWNNASNMLYIDQPVQTGFSYSIPVPGYVDSSTDNVIALPSPACPDYAADMFCGTYSYPNVSLTANSTDNAAPNFYRALQGFMGAFPQYSRETFHFTTESYGGHYGPVFNEYIEEQNAHLQPGAKKIQLGSVMIGNGWYDPIIQYQAYYNFTVYPGNTYDYLPFNKSISSLMYNNLYGPGNCLDQLYDCAARGIDEICSTADDFCANEVENVYDIYSGRDEYDFRELTPDPFPYEFYVDYLNKASVQAAIGAYINYTESNNAVGLAFSSTGDDGRLMNTIQDVGKLLKQGVTVVMYAGDADYNCNWLGGEAVSLQVKAANFSSAGYTNIVTSDGVTHGQVRQAGQFAFVRVYESGHEVPFYQPLLALEMFERVIGGKDVATGKIPISSSLQTVGTPKSYYREGNSTIQWEVLDSLATYNTTTNAPNPVSRRLKRMGPALRFQM

SEQ ID NO: 44 - DNA, 3133 bp, Aspergillus niger
tctacaacaaattcacaagtcgcgaataagttctttcaagtatcaaacggagtactagaagacccacgcaccatgtcctccaccacgttcgcctccgaagccaccaccttcgaatcggccctaaccagcctcttcagcggccctcctgagaccaccgaagccgatctagccaagctcttcacacctaccttcacacagcgtgacgatgagacaacgcgcgacttccctgcctttgtcgcgcacatcaagtggctgcgggggattctcccaccaggaagcgtgacactcaaaattacccagttcctgcgggacgggaatcaatttgcggatagacacagctcgaccatgaaaatgccggatggaaaagtgggcgccgcggagacgtttatgtttggggaggtggcagaggatggacgaattgagtgggtggtggagacagtgaagcggaagtagtgaaagtgaggactgggataattccggcgggatgaggcattaaattgttgtgattgctaagagacatcacattgctcatatgagtttgattgcgactgttaatattaatgtccgactgggaggaaatgagtggcgttatccaggcagctgcatgcaatactacattcccctcacgagggaaatctggccatctcggaaatcaatggtgtcatccgagttgattcccctcaataatggtcctgataagccactattgctgcagaacgcctatctgtgccgttagtgcatgcatagtgtccccagttctttttctgccgattaatctattgccagacggactccgtcgcgcttccgaatgccgggaaccgcggctaagctttgctgtagctttgctgcaggaacatctgcatctttcaaaatatcttcagaggagccgatcgctgagtttctcaagagattagatgaatgttcgtacttggccgcaatataagcttcatggcggcttcaaccttccatgagaaataagaataaggctgccggggatggcctcaccgtgtccctgcatgcaagggatgcataatgcaccgtgacctgttccaccacgccggagcccgcccgccctccgacggcccaaacccactgcagaatggcttgattaagttccccttctataactaaccggttgttcctcgtcgttgtctgctctgctctccacccagggtcgtttttgcttttgcctccttaaccatggtcgccttttcccgcatctcggcaggcttcgcccttgccgcccctgccctggccagcgtcgtcctggagaccgtcaagtctgttcccagcgactggaagctcgtggaggctgctgataccagctccacaatttctttgtccgttgctctggcgcgtcagaacctggaccagttggaggagaagctcctggccgtgtccacccctggcaaggacacctacggccagttcttggatctggacgacatcaatgagcagtttcctctcgcagatgacgctgctgttgtggcttggctgaagaaggcaggcgtcacccagatccataaggagggtggtctgctgaactttgcgaccactgtgggcacagccaaccagcttctcaacaccaccttctcggtgtacaagagcggatctacccagaagctgcgcacaacgcaatactctgttccggatgagctgaccgggtccattgatctcatctcgccgactgttttctttggaaagtccaacgctgcgcgctcggcggccgtgcgtgcttcgcagactaccaaggagaccagcagaaagaagagcagtaatgtgtgcgagtacatcactccggattgcctcaaagagcagtatagcattgactatacgcccgaggcatcgtcgggaagtcgtgttgggtttggcagtttcttgaacgagtcggccttgtactcggatttggatctgttcacccagtactttgacattccccagcagagtttcactgttgagactatcaacgggggaatcaacaaccaggagaatgatccggatggtgaagccgatctcgatgtccagaacatcgtgggcatctcgcatcccttgccggtgacggagtacattaccggaggatctccgtgagtgttcccaaagatgcaattgaattaaagctaatggttcagtccattcattcccgacgtcgagactactaccgacgagaacgagccttacctgcagtactacgagtatctgctggccaagaccaacgacgagctgccactggttatcagcaactcgtacggcgatgacgaagatgtaagcatccctgcctcccacacaaatcgcctgctgacagaatagaccgttcccattgcctacgccacccgcgtatgcaacctcatcggcctgatgggcacacgtggtatctccatcctcgagtcttccggcgactctggtacgttgtaccccatatatattgcatcaagtcccgactgacaaatacaggtgtgggcggcgcatgcatgtccaacgacggcaccgacaagaccgaattcacccccatgttcccaggaacatgcccgtacatcaccgcggtcggcggcacccaagacgtgcccgaagtcgcctgggtggacagctccggcggcttcagcaactacttctcgcagccgtcgtaccagtcggatcaggtggagacctacctggacaagtacatctctgcctcgacgaagaagtactacgagcagtacaccaacttcagcggtcgcgcgttccctgacgtgtctgcgtttgcaggttctccttagtatgtatccatcccagatgattgtatggacatctgctaatgtccgacagctacgaaacttatattgatggtcagctcggccttgtggcgggtacttctggcgctagccctgtgtttgcggggatcgtcgcgctgctgaacgatgcccgtctgcgggccaacaagacatccttgggcttcctgaacccttggctgtactcgagcggctacaagagcctgaatgacattaccagtggcgaggcagtgggctgccaaggcgatgtggagggcgctggagtcattccttgggcgagctggaatgccacgacgggatgggatccggcgacagggctgggaacgcctaattttgccaagctgaaggaggcggttcttgcgttgtaa

SEQ ID NO: 45 - DNA, 1743 bp, Aspergillus niger
  CDS (1)..(1743)
atggtcgccttttcccgcatctcggcaggcttcgcccttgccgcccctgccctggccagcgtcgtcctggagaccgtcaagtctgttcccagcgactggaagctcgtggaggctgctgataccagctccacaatttctttgtccgttgctctggcgcgtcagaacctggaccagttggaggagaagctcctggccgtgtccacccctggcaaggacacctacggccagttcttggatctggacgacatcaatgagcagtttcctctcgcagatgacgctgctgttgtggcttggctgaagaaggcaggcgtcacccagatccataaggagggtggtctgctgaactttgcgaccactgtgggcacagccaaccagcttctcaacaccaccttctcggtgtacaagagcggatctacccagaagctgcgcacaacgcaatactctgttccggatgagctgaccgggtccattgatctcatctcgccgactgttttctttggaaagtccaacgctgcgcgctcggcggccgtgcgtgcttcgcagactaccaaggagaccagcagaaagaagagcagtaatgtgtgcgagtacatcactccggattgcctcaaagagcagtatagcattgactatacgcccgaggcatcgtcgggaagtcgtgttgggtttggcagtttcttgaacgagtcggccttgtactcggatttggatctgttcacccagtactttgacattccccagcagagtttcactgttgagactatcaacgggggaatcaacaaccaggagaatgatccggatggtgaagccgatctcgatgtccagaacatcgtgggcatctcgcatcccttgccggtgacggagtacattaccggaggatctcctccattcattcccgacgtcgagactactaccgacgagaacgagccttacctgcagtactacgagtatctgctggccaagaccaacgacgagctgccactggttatcagcaactcgtacggcgatgacgaagataccgttcccattgcctacgccacccgcgtatgcaacctcatcggcctgatgggcacacgtggtatctccatcctcgagtcttccggcgactctggtgtgggcggcgcatgcatgtccaacgacggcaccgacaagaccgaattcacccccatgttcccaggaacatgcccgtacatcaccgcggtcggcggcacccaagacgtgcccgaagtcgcctgggtggacagctccggcggcttcagcaactacttctcgcagccgtcgtaccagtcggatcaggtggagacctacctggacaagtacatctctgcctcgacgaagaagtactacgagcagtacaccaacttcagcggtcgcgcgttccctgacgtgtctgcgtttgcaggttctccttactacgaaacttatattgatggtcagctcggccttgtggcgggtacttctggcgctagccctgtgtttgcggggatcgtcgcgctgctgaacgatgcccgtctgcgggccaacaagacatccttgggcttcctgaacccttggctgtactcgagcggctacaagagcctgaatgacattaccagtggcgaggcagtgggctgccaaggcgatgtggagggcgctggagtcattccttgggcgagctggaatgccacgacgggatgggatccggcgacagggctgggaacgcctaattttgccaagctgaaggaggcggttcttgcgttgtaa

SEQ ID NO: 46 - protein, 580 aa, Aspergillus niger
MVAFSRISAGFALAAPALASVVLETVKSVPSDWKLVEAADTSSTISLSVALARQNLDQLEEKLLAVSTPGKDTYGQFLDLDDINEQFPLADDAAVVAWLKKAGVTQIHKEGGLLNFATTVGTANQLLNTTFSVYKSGSTQKLRTTQYSVPDELTGSIDLISPTVFFGKSNAARSAAVRASQTTKETSRKKSSNVCEYITPDCLKEQYSIDYTPEASSGSRVGFGSFLNESALYSDLDLFTQYFDIPQQSFTVETINGGINNQENDPDGEADLDVQNIVGISHPLPVTEYITGGSPPFIPDVETTTDENEPYLQYYEYLLAKTNDELPLVISNSYGDDEDTVPIAYATRVCNLIGLMGTRGISILESSGDSGVGGACMSNDGTDKTEFTPMFPGTCPYITAVGGTQDVPEVAWVDSSGGFSNYFSQPSYQSDQVETYLDKYISASTKKYYEQYTNFSGRAFPDVSAFAGSPYYETYIDGQLGLVAGTSGASPVFAGIVALLNDARLRANKTSLGFLNPWLYSSGYKSLNDITSGEAVGCQGDVEGAGVIPWASWNATTGWDPATGLGTPNFAKLKEAVLAL

SEQ ID NO: 47 - DNA, 3591 bp, Aspergillus niger
ctgagtcatacttttctaccacccgcacaagccgaatttcagccgagttacatatactaacttatgtgcgtcttagtgtgaattttccctactgaaatcctatttctataactaggataaatgttcgaatctaattgatattttcaggtgctatgatggttactgtactttcgtatattcattttacacgttgaagtatttaacatacttcgataaaatagactttgagctctatagaagatcgcttaggcgttctcctttgtggccggaacagttactcttgccacgcacctttatccacaatccacctcccaagctgttgccaggcagcaaaaagtggcgccaaattcggcctggactacggcggtctcaaaaatcagatttgccagatgcccgctaatacccggcgtactagagcagaaagggaaggcgactaaagtctgctggaaatacaccgtaatacccatttcgatgctaactgtccgggaatcatttctaggtttctcgtacagatgggtagacggtggatagaaatccctatgctcaacacatacatacaggtcatgcgtccttaaaccctcccattggccccttcccctccacaagatgacatccaattttcctagcaaattcccgggcttgatcctccgttatcgcttgcgcattagatgactttctattttcggccaagtctttcttccgataaggatgaatagcggttgagcccgtcaagcgggcagccaacataaattgatctgcaagtggtcgggtttgcaaagctggttattagggctgtgtgtgatagttcttatcccgtgcaggcacagatacccctctctgcttaattaaccacccgtcaggtgtccgcacttacatggcgccattaatgtctaaaagcaagacattaattcatccttcaccaatcaatggccatcattggttgcaatgacggataagatacatttagttacataactatatattgaccatggtctgataagggtccgttctcctcacggaagtgagacgttgctagttcccgtgccctaacatgaattggatgccgaaaggatgcaaccccgtcggagtgtatacggagatgcgtcggagtctatttcattataaatatcagggtagcagtatgtgatgttcacagtactcttgcactgaagtagggtacagacgggataaggagtcagaatgaagttcttctcgacaatctgcagtttgacccttgcggtctctgcgttggccttgccaacttctgaccatgttattcatgagaagcgatctgctaccccatctcgatgggagaagatcagtcgggtcaatggtactgagcatgtcttggtgcgcatcggtctgacgcagaacaatcttgatcgagcctatgagtatctcatgagcgtgtacgttgcttcctttaccctatattgttccgactgactagtcaggtctgactccgtgtcgcctaactacggcaaattctggactccagaagaggtgcacagtacctttgcgccgtcgaatgagactgtcaacgctgtgcgcaactggcttattgaatccggtgtggatgagtcgcgcttggttcacaccaaaaaccaaggctggattgtgtttgatgcaaccaccaaagaagcggaaaatctcctccacaccaagtattaccactacactgaccggatttctggcttcaagacactcgcagcggaagagtatgtctcccattcattctcagagatatagtatactaacaagacgaccagataccgcgtcccccagaagatccaacaacacatcgacttcattaaacccggcgttcttctcccattgacctccaagggcccatctgccaagcacaccaagaagtacaaacccttgaagcagacatcagtcaacgccacgtctctcaccacgtgcgacgaggtcatcactccagcttgtgtcgccgctctgtacaagatccctcacgcaagcggcaacgtcagtgcaagcaattcgcttggaatcttcgaagaaggagactactacgcccaggaagatctggatctctttttccgcaacttcaccccgtacattccgaagggaacacaccctaagccggcatttatcgatggagcctcagcgcccgtgagcgttgccgatgctggtgcggagtcggatttggactttcagcttgcgtatccaattgtttaccctcagaccatcacgctgtatcagacagatgactatgactatgcaagtggggaggttgagactgatggattctttaacacctttcttgatgctgttgatggggtaagttggcctctggaattttcggatttagctaatgattcagtcatactgcacctactgtgcctatggggaatgcggagacagcccgactctcgatcccacttacccagataactccaccggagggtacaagggacagttgatgtgcggtgtttataagcccacgaatgtcatctccgtctcttatggtggccaggaggccgacctcccggcttactaccagcagcgacaatgcaatgagtatgccatccccgcctctgtttatacagccccaaattaacaacaggaatagattcctcaagctcggtctccagggaatttccatcctcttcgcctctggcgatgatggcgtcgcagggcccccaggcgacgactcgactaacgggtgtctcggaaatggaaccatcttcagtcctgcgttccccaattcgtatgttttcttctcttgcaatatccttgcaacaaccacatctaacttctctagttgcccctgggtgactaatgtcggagccaccaaactctaccccggaaagaccatcgcagacggggaaagcgccgtcgtcgacccggccggccacccctactcggtcgcattctcctctggtggtggcttcagcaacatctatactattccagactatcaagccgaagcagtagcagagtaggttcttttctatcatcctatacgcgcaatctaacaacccccattcagatacttcaaaaagcacaacccgccctatccttactacgaaggcaacgccagcttcggcaaaaacggcggtgtctacaaccgtcttggacgtgggtaccccgacgtggcagcgaacggcgacaacatcgcggagtacaacgcgggagaattcatacttgagggtggaactagtgctagtacgttactaccctactacatccacccaactccgttatatttcaattactaatgacaataatcaaaaggtaccccgatcttctcctccgtgattaaccgcatcattgagaagcgcatcgcggcaggaaagggcccactaggcttcctgaacccggttctgtatcggaatgcgtgggcgttgaatgatattacgaacgggtcgaatccgggttgtggaacggaggggttctatactgctcctgggtatgtattttcctctcgatcttttattcctttattaccgtgcttcgatatatggagccatgctaacaatcggtgaacaaaatagatgggatcccgtcaccggtctcggaacgcctaacttcccgaaattgctggacgtgttcctgaacctcccgtaa

SEQ ID NO: 48 - DNA, 1941 bp, Aspergillus niger
  CDS (1)..(1941)
atgaagttcttctcgacaatctgcagtttgacccttgcggtctctgcgttggccttgccaacttctgaccatgttattcatgagaagcgatctgctaccccatctcgatgggagaagatcagtcgggtcaatggtactgagcatgtcttggtgcgcatcggtctgacgcagaacaatcttgatcgagcctatgagtatctcatgagcgtgtctgactccgtgtcgcctaactacggcaaattctggactccagaagaggtgcacagtacctttgcgccgtcgaatgagactgtcaacgctgtgcgcaactggcttattgaatccggtgtggatgagtcgcgcttggttcacaccaaaaaccaaggctggattgtgtttgatgcaaccaccaaagaagcggaaaatctcctccacaccaagtattaccactacactgaccggatttctggcttcaagacactcgcagcggaagaataccgcgtcccccagaagatccaacaacacatcgacttcattaaacccggcgttcttctcccattgacctccaagggcccatctgccaagcacaccaagaagtacaaacccttgaagcagacatcagtcaacgccacgtctctcaccacgtgcgacgaggtcatcactccagcttgtgtcgccgctctgtacaagatccctcacgcaagcggcaacgtcagtgcaagcaattcgcttggaatcttcgaagaaggagactactacgcccaggaagatctggatctctttttccgcaacttcaccccgtacattccgaagggaacacaccctaagccggcatttatcgatggagcctcagcgcccgtgagcgttgccgatgctggtgcggagtcggatttggactttcagcttgcgtatccaattgtttaccctcagaccatcacgctgtatcagacagatgactatgactatgcaagtggggaggttgagactgatggattctttaacacctttcttgatgctgttgatgggtcatactgcacctactgtgcctatggggaatgcggagacagcccgactctcgatcccacttacccagataactccaccggagggtacaagggacagttgatgtgcggtgtttataagcccacgaatgtcatctccgtctcttatggtggccaggaggccgacctcccggcttactaccagcagcgacaatgcaatgaattcctcaagctcggtctccagggaatttccatcctcttcgcctctggcgatgatggcgtcgcagggcccccaggcgacgactcgactaacgggtgtctcggaaatggaaccatcttcagtcctgcgttccccaattcttgcccctgggtgactaatgtcggagccaccaaactctaccccggaaagaccatcgcagacggggaaagcgccgtcgtcgacccggccggccacccctactcggtcgcattctcctctggtggtggcttcagcaacatctatactattccagactatcaagccgaagcagtagcagaatacttcaaaaagcacaacccgccctatccttactacgaaggcaacgccagcttcggcaaaaacggcggtgtctacaaccgtcttggacgtgggtaccccgacgtggcagcgaacggcgacaacatcgcggagtacaacgcgggagaattcatacttgagggtggaactagtgctagtaccccgatcttctcctccgtgattaaccgcatcattgagaagcgcatcgcggcaggaaagggcccactaggcttcctgaacccggttctgtatcggaatgcgtgggcgttgaatgatattacgaacgggtcgaatccgggttgtggaacggaggggttctatactgctcctggatgggatcccgtcaccggtctcggaacgcctaacttcccgaaattgctggacgtgttcctgaacctcccgtaa

SEQ ID NO: 49 - protein, 646 aa, Aspergillus niger
MKFFSTICSLTLAVSALALPTSDHVIHEKRSATPSRWEKISRVNGTEHVLVRIGLTQNNLDRAYEYLMSVSDSVSPNYGKFWTPEEVHSTFAPSNETVNAVRNWLIESGVDESRLVHTKNQGWIVFDATTKEAENLLHTKYYHYTDRISGFKTLAAEEYRVPQKIQQHIDFIKPGVLLPLTSKGPSAKHTKKYKPLKQTSVNATSLTTCDEVITPACVAALYKIPHASGNVSASNSLGIFEEGDYYAQEDLDLFFRNFTPYIPKGTHPKPAFIDGASAPVSVADAGAESDLDFQLAYPIVYPQTITLYQTDDYDYASGEVETDGFFNTFLDAVDGSYCTYCAYGECGDSPTLDPTYPDNSTGGYKGQLMCGVYKPTNVISVSYGGQEADLPAYYQQRQCNEFLKLGLQGISILFASGDDGVAGPPGDDSTNGCLGNGTIFSPAFPNSCPWVTNVGATKLYPGKTIADGESAVVDPAGHPYSVAFSSGGGFSNIYTIPDYQAEAVAEYFKKHNPPYPYYEGNASFGKNGGVYNRLGRGYPDVAANGDNIAEYNAGEFILEGGTSASTPIFSSVINRIIEKRIAAGKGPLGFLNPVLYRNAWALNDITNGSNPGCGTEGFYTAPGWDPVTGLGTPNFPKLLDVFLNLP

SEQ ID NO: 50 - DNA, 3468 bp, Aspergillus niger
ggtgcgaaagggagcatgctcccggcgcaaaacaatctcagcatgcgttcgatcactcctgattacagcttgaacacattcccgtctctagcacctgccactcgggcaaaatctcccccaacgccatcatttcctactctgcagccttcgccttcttcatcgtggagcataccaaaccccgcaactaatcagcaatcgactcagagatctaatgtttcgggtatttctctgggagcgttagcgaacatgaagacacaggctcctatgcctagccaagccactcaagctgctcccaattactctgcattttcaatccctccgcctccgtcgggccacagctccgttggatcgtttggcagtcccggaggactagctaagccggggggctcggcttttggtacaactgcctcctccaatgcgttcctaaacaacagtgcgccacaagcaacaccaaagcaaggcctcgataagtacgagagcttgctgtgaaccccgggggtaaggttatacaatggtttcaaccgcatattttacaaattatagccatcaggctctgatactctttgggatttcccctttatttcgttttgtctttctagcatagtcaccggttatgttgtgtgtacagcatcatgcatgattcccccatggtttcaggcgtagttcaaaatgggcttcaaaaagttttcatttcctccattgtctaagttggctccatatggagcaaaagaagggatgtgacatatctagtatactacatcatcagactacatcgtggtaatggagcatgaggagagggcagtgttggtgtgagttgtctgtggtggagcaagagtcatggaagcgataagtgtaggctccactttttttgttgccaagcaacccgatagtagattgatactattccattcgactgcaatctaggttcctttccccgacggtgacccgacgtagcagtgacggagattctgggtacccacggccaccaacagctctccaggaatgcaacctcctcttcgaggcgccttgagacgctttccgtcggctcagcgttttgtcctcccccaccgcccctcgtccctgctgcccctccgtcatcgtctgcctcctctccacctcacccgctgctcttcctcgtctgtagcaaatacccttccttcatcctccgattccctgattcacccccctcaccaagccacaatggacgcccaggtcaagcagcactacctggccgactctccgccaaccgtggttcgcttggaagtcaagtctcactttgacaatctcacggacccgaagctgcggaaatacgcccattatttgagcaggtgcgcctaaatccctatagcccatacatttgctagtatttcggtgtcatgtggcgtctcgctaacatgcatgtgtgtgtagagctgcctttgagggaactcgtatcaccctccgtcaggtctcgccggagtccgagcctatttacgacctcattctcgagcttcatcgggcctgtgatgggaactggtcagaacttgctcagaagaccaatgtcagcgatgagcatctacgctacttcttggagtatgcaacccaatttcttgggaattgtggtaactacaagggtttcggagactcgaaattcattccccgactcccggttgaggctttccaggctttagcttcggccacgccaaagacaaaggctgcctttgacttggccaactctactggtggtggcatctacgagactgatgagcagtcccgtatgcacctcggctacccggaggggggacacatgacaacatactaccccgactcaccgtctatcacaaaggatgaaatcacggctatcggagatctgatggaggcgaaaggattgccgttggagaacacaagactcaagaagaccgagtccggtgacttccaactattgattgcatcgggtgtttcctcaccacccgtgcgggatagagatcttggcgatgccgagatcttcgaattggatggaaagctcaagggaaagacgcttcgtctcgtctttggtgactatcgggaggaaatggcgaaggtcgctcacagcgtaaagcaggcgggactcaatgcagcaaatgagaaccagaagcggatgttggatgcatatgccatgtcattcggctctggctcgattgaagcattcaaggagagtcagaggatctgggtgaaggaccagaagccggctctagagacgaatctgggctttgtcgaaacctacagagacccccacggtgtgagaggagaatgggaaggatttgttgctctggtaagcgtcacttcagatctcaagacatatcgctcggacagctaacagagctcccaaaacaggtcaacttggagcggacacgtgcttttggaaaattggtggacagtgccgaagccatgatccccaagcttccttggggtaaggattttgagaaggacaagttcctgagtcctgacttcacctccctggaagtgctgagcttccagtcttctggtatcccggctggtatcaatttgcctaattacgatgatatccggcaaaaccttggatttaagaacgtctccctcggcaatgtccttagcgcaaaggctcctaatgagcctgtgcctttcattgcggagaaggatctggaggtctaccgtagatgccgtgatgctgcgtttgaggttcaggtcggcattcatgaattgcttggtcatggaaccggaaagttgctccaggaaacagcccctggggagtacaatttcgatgtctccaatccccccattagcccagtgacgaacaagcctatctcatcctggtacaagcctgggcagacttggggctcggtgtttggagcaatgtcttcttcctatgaagagtgccgcgcggagtgtgtcgccatggcgctcagctgcgactttagcatcctgcagctgtttggtttcggcgacggtaaggaagatctggcgaacgaggccggtgacgttctttttgcaggatacctgcagatggctcgtgctggtctcgtggctctggagttctgggatcccaagacgcagaagtggggacaggcccatatgcaggcccgatacagtatcctacgtaccttcctcgatgctggaggcgaatttgtcaagctctcatacactaaggatgacctatccgatctggagatccacctggaccgttccaagattctgactcatggtcgtcctgctgtggagaagtacctgcagaaattgcatgtctacaagagtactgcagactttgaagcaggcaagaagctctatgacgatatcacatcagtcgatgagtggtggggtaccaaggtgcgcgagattgttctcaagaacaaaatccctcgcaaggtcttcgtgcaaggcaacactatcttgaacggggatgaagtaaccctcaaggagtacgagcctacacttgaaggaatgatccagagctttgtggagcgtaatgtctaa

SEQ ID NO: 51 - DNA, 2124 bp, Aspergillus niger
  CDS (1)..(2124)
atggacgcccaggtcaagcagcactacctggccgactctccgccaaccgtggttcgcttggaagtcaagtctcactttgacaatctcacggacccgaagctgcggaaatacgcccattatttgagcagagctgcctttgagggaactcgtatcaccctccgtcaggtctcgccggagtccgagcctatttacgacctcattctcgagcttcatcgggcctgtgatgggaactggtcagaacttgctcagaagaccaatgtcagcgatgagcatctacgctacttcttggagtatgcaacccaatttcttgggaattgtggtaactacaagggtttcggagactcgaaattcattccccgactcccggttgaggctttccaggctttagcttcggccacgccaaagacaaaggctgcctttgacttggccaactctactggtggtggcatctacgagactgatgagcagtcccgtatgcacctcggctacccggaggggggacacatgacaacatactaccccgactcaccgtctatcacaaaggatgaaatcacggctatcggagatctgatggaggcgaaaggattgccgttggagaacacaagactcaagaagaccgagtccggtgacttccaactattgattgcatcgggtgtttcctcaccacccgtgcgggatagagatcttggcgatgccgagatcttcgaattggatggaaagctcaagggaaagacgcttcgtctcgtctttggtgactatcgggaggaaatggcgaaggtcgctcacagcgtaaagcaggcgggactcaatgcagcaaatgagaaccagaagcggatgttggatgcatatgccatgtcattcggctctggctcgattgaagcattcaaggagagtcagaggatctgggtgaaggaccagaagccggctctagagacgaatctgggctttgtcgaaacctacagagacccccacggtgtgagaggagaatgggaaggatttgttgctctggtcaacttggagcggacacgtgcttttggaaaattggtggacagtgccgaagccatgatccccaagcttccttggggtaaggattttgagaaggacaagttcctgagtcctgacttcacctccctggaagtgctgagcttccagtcttctggtatcccggctggtatcaatttgcctaattacgatgatatccggcaaaaccttggatttaagaacgtctccctcggcaatgtccttagcgcaaaggctcctaatgagcctgtgcctttcattgcggagaaggatctggaggtctaccgtagatgccgtgatgctgcgtttgaggttcaggtcggcattcatgaattgcttggtcatggaaccggaaagttgctccaggaaacagcccctggggagtacaatttcgatgtctccaatccccccattagcccagtgacgaacaagcctatctcatcctggtacaagcctgggcagacttggggctcggtgtttggagcaatgtcttcttcctatgaagagtgccgcgcggagtgtgtcgccatggcgctcagctgcgactttagcatcctgcagctgtttggtttcggcgacggtaaggaagatctggcgaacgaggccggtgacgttctttttgcaggatacctgcagatggctcgtgctggtctcgtggctctggagttctgggatcccaagacgcagaagtggggacaggcccatatgcaggcccgatacagtatcctacgtaccttcctcgatgctggaggcgaatttgtcaagctctcatacactaaggatgacctatccgatctggagatccacctggaccgttccaagattctgactcatggtcgtcctgctgtggagaagtacctgcagaaattgcatgtctacaagagtactgcagactttgaagcaggcaagaagctctatgacgatatcacatcagtcgatgagtggtggggtaccaaggtgcgcgagattgttctcaagaacaaaatccctcgcaaggtcttcgtgcaaggcaacactatcttgaacggggatgaagtaaccctcaaggagtacgagcctacacttgaaggaatgatccagagctttgtggagcgtaatgtctaa

SEQ ID NO: 52 - protein, 707 aa, Aspergillus niger
MDAQVKQHYLADSPPTVVRLEVKSHFDNLTDPKLRKYAHYLSRAAFEGTRITLRQVSPESEPIYDLILELHRACDGNWSELAQKTNVSDEHLRYFLEYATQFLGNCGNYKGFGDSKFIPRLPVEAFQALASATPKTKAAFDLANSTGGGIYETDEQSRMHLGYPEGGHMTTYYPDSPSITKDEITAIGDLMEAKGLPLENTRLKKTESGDFQLLIASGVSSPPVRDRDLGDAEIFELDGKLKGKTLRLVFGDYREEMAKVAHSVKQAGLNAANENQKRMLDAYAMSFGSGSIEAFKESQRIWVKDQKPALETNLGFVETYRDPHGVRGEWEGFVALVNLERTRAFGKLVDSAEAMIPKLPWGKDFEKDKFLSPDFTSLEVLSFQSSGIPAGINLPNYDDIRQNLGFKNVSLGNVLSAKAPNEPVPFIAEKDLEVYRRCRDAAFEVQVGIHELLGHGTGKLLQETAPGEYNFDVSNPPISPVTNKPISSWYKPGQTWGSVFGAMSSSYEECRAECVAMALSCDFSILQLFGFGDGKEDLANEAGDVLFAGYLQMARAGLVALEFWDPKTQKWGQAHMQARYSILRTFLDAGGEFVKLSYTKDDLSDLEIHLDRSKILTHGRPAVEKYLQKLHVYKSTADFEAGKKLYDDITSVDEWWGTKVREIVLKNKIPRKVFVQGNTILNGDEVTLKEYEPTLEGMIQSFVERNV

SEQ ID NO: 53 - DNA, 4009 bp, Aspergillus niger
ggagggaagggaaaaagggaatgattgttagggaagaaatgggtttgttttgatagacttgctgtctttcttcgagatacctcttgtgttttattactagatttaaagctaaagctcctttcaacaatcgacgagatattgctgaatactgttcttgaacatagaatcataaatgtgccattgatatagatttcttaaataattattgtatagaatatgtatgtcccagccctctatggaagcccattcaccggaagaaagcatcagatgcctctaatcatgaacccctcaaactggctggtggaccgtcttgcaagccactgctcccgaaggagcagctcgacagccaactgccagatagaggaatatctacccttgaaggcaaacctggcacccggctgtatggagaagacctgcgtgaaagaatgtaatatgtatggagaaaaagaaggaaaaggaaaagggacgcagaaatgggagaaaagatgggtgacatgtgatgcggagaaaccctggtcgagtagcccttattgacttccagaagaggaaaggcgttgggccaggggggagctgattgcctgatttagtaggctactcagttttggctgactagttggtcagatgactggatcgtgttagtcatagtaagattaccgcctgccggattcagacggacgaccgacggaattcccgcggcaaaaagggaacttttctttcccttcgagattggatgaattgttgatggattgattgaaggagagaataacctcattgtatcagtaatctttttggtcattgttgtcttttgatttgtctactatccgctgtatcattttgggttgtttatctgggtggggactgcgtgtgtgtgtctcttctttgtcaatctgtcttttctctctatcaagactcgttcccatgcgtcgctttccctcctccgcacggctcccgctgagcaacagcagcaacagaagggcagctgctgctcccctccgcttccaccgactctctgctcttccccgcccctcttctacttctacttttaacttccccactgcttctttatctactactactacgccctcctctctcaccttcttctcctccccttcttcttctactgtccctcctctccatcgctcttctcttcgtcgtgctcccctctctcaagcttccaaacgttactgttcctatcgcaggatgtgtggtgctcgacgcggagaggtgacgggctcgaccaacgtccccggtggtcgtgaggtcttgcccaccaacgtcaagccccttcactatgacctgaccctcgaacctaactttgccaacttctcctatgacggtaccgtcgtcattgagtacgttcatgctcttccctacccacccatgaaccctagctggttaccccgccatctggagcagtagctaactctccgggaatatagtctcgacgtcgctgaagataccacctccatctccctcaactccaacgagatcaagatccacaatgccgtcgtctcctcccaaggcgccgtcgtggcctccaaccccgagatcaccctcaaccaggaccagcaggttgcgaccatcaagttcgccgacactatccccgccggttcctccgcccagctgaagctgaccttcactggtgagctcaacgacaacatggccggtttctaccgctcctcctacaaggctgccgatggtcagactaagtacattgccacgacccagatggagcctactgatgcccgccgcgccttcccctgcttcgacgagcccgctttgaaggccaagttcaccgtgaccctggtggcagacaagagcatgacatgtctgagcaacatggacgtcgccagtgagaccgaggttgccggcggcaagaaggctgtgaagttcaacacctccccggtcatgtcgacttacctgctcgccttcattgtcggccacctcaactacatcgagacgaaggctttccgcgtccccatccgtgtctatgctaccccggatcaggatattgagcacggtcgcttctcgctggacctggccgcccgcactctggccttttacgagaaggcgttcgataacgagttccctctgcccaagatggacatggtcgccgtgcccgacttcagcgctggtgccatggagaactggggtctgatcacctaccgtgtcgttgacgtgctgttggatgagaagaccagcggtgccgcccgcaaggagcgtattgccgagaccgtccagcacgagctggcccaccagtggttcggtaacttggtcaccatggacttctgggatggcctctggctcaacgagggtttcgccacctggatgtcctggtactcttgcaacagcttcttccccgagtggaaggtctggcagacgtatgtcatcgacaccctgcagggcgccctgtccttggattcgctgcgcagcagtcaccctattgaggtgcccgtgaagcgtgccgacgagatcaaccagatcttcgacgccatctcctactccaagggatcctccgttctgcgcatgatctctaagtacatgggtgaggatgtcttcatccagggtgtgcgcgactacatcaagaagcacgcctacggaaacacccagacgggtgatctgtgggccgccctggctaacgccagtggcaagcccgtggaggaggtcatggacatctggaccaagaaagtcggtttccccgttgtgactgtctcggagaaccccagcaactccaccatcaagctgaagcagaaccgtttcctgcgcaccggcgatgtccgccccgacgaggacaccacgctctaccccgtcatgctgggtctgcgtaccaagaatggcatcgacgaggacaccatgctgaccgagcgcgagggcgaatttaaggtgcccgaccttgacttcttcaagctcaacgcggaccactccgccatctaccgcacctcgtacaccccggagcgtctgtccaagctgggtgaggcggccaagggcggacttttgagcgtcgaggaccgcgctggtatgattgccgatgccggtgccttggccgcgtccggcttccagagcacctccggcctgctgtcgctgctgaagggcttcgacagcgaggctgagttcatcgtatggaacgagatcctgactcgtgttggctctctgcgggctgcttggctgttcgaggatgtttccaccagggacgccttgaaggccttccagcgctctctggtcagccacaaggcgcatgagctcggatgggaattctcggagaaggatggccacatcctgcagcaattcaaggctctgatgttcggcagtgctggtatggctgaggacccggtcgtcgtcaaggccgcccaggacatgttccagcagttcgccgccggcgacgagaacgccatccaccccaacattcgcggcagcgtattcagcattgtgctgaagaacggtggcgagaaggagtacaacgtcgtcctcgaccgcttccgcaatgcccccacttccgatgagaagaccacggccctccgctgcctgggtgccgccgaagaccccgccctgatccagcgcactctcgacctggccagcggcgacgaggtcaagaaccaggacatctacatgcccctgggtggtctccgcagccaccctgcgggtatcgaggctcgctggtcttggttgaagaacaactgggatgccatctacaagcgtctgcctccgtctctcggtatgctgggcacggtggtgcagctcagcacagccagcttctgcactgaggagcagttgaaggatgtgcaggactttttccagagcaaggacactaaggtaggccccatcccttcctttcattagttacacctgtgttgttcaagttttatgtgctaactattttctcgtatagggcttcgaccgtgccgttgagcagagtctcgactcgatccgggccaaggtcaactgggtcaagcgtgaccgggcggacgtggagtcgtggctcaaggccaacagctacaatggtaagctgtaa

SEQ ID NO: 54 - DNA, 2646 bp, Aspergillus niger
  CDS (1)..(2646)
atgtgtggtgctcgacgcggagaggtgacgggctcgaccaacgtccccggtggtcgtgaggtcttgcccaccaacgtcaagccccttcactatgacctgaccctcgaacctaactttgccaacttctcctatgacggtaccgtcgtcattgatctcgacgtcgctgaagataccacctccatctccctcaactccaacgagatcaagatccacaatgccgtcgtctcctcccaaggcgccgtcgtggcctccaaccccgagatcaccctcaaccaggaccagcaggttgcgaccatcaagttcgccgacactatccccgccggttcctccgcccagctgaagctgaccttcactggtgagctcaacgacaacatggccggtttctaccgctcctcctacaaggctgccgatggtcagactaagtacattgccacgacccagatggagcctactgatgcccgccgcgccttcccctgcttcgacgagcccgctttgaaggccaagttcaccgtgaccctggtggcagacaagagcatgacatgtctgagcaacatggacgtcgccagtgagaccgaggttgccggcggcaagaaggctgtgaagttcaacacctccccggtcatgtcgacttacctgctcgccttcattgtcggccacctcaactacatcgagacgaaggctttccgcgtccccatccgtgtctatgctaccccggatcaggatattgagcacggtcgcttctcgctggacctggccgcccgcactctggccttttacgagaaggcgttcgataacgagttccctctgcccaagatggacatggtcgccgtgcccgacttcagcgctggtgccatggagaactggggtctgatcacctaccgtgtcgttgacgtgctgttggatgagaagaccagcggtgccgcccgcaaggagcgtattgccgagaccgtccagcacgagctggcccaccagtggttcggtaacttggtcaccatggacttctgggatggcctctggctcaacgagggtttcgccacctggatgtcctggtactcttgcaacagcttcttccccgagtggaaggtctggcagacgtatgtcatcgacaccctgcagggcgccctgtccttggattcgctgcgcagcagtcaccctattgaggtgcccgtgaagcgtgccgacgagatcaaccagatcttcgacgccatctcctactccaagggatcctccgttctgcgcatgatctctaagtacatgggtgaggatgtcttcatccagggtgtgcgcgactacatcaagaagcacgcctacggaaacacccagacgggtgatctgtgggccgccctggctaacgccagtggcaagcccgtggaggaggtcatggacatctggaccaagaaagtcggtttccccgttgtgactgtctcggagaaccccagcaactccaccatcaagctgaagcagaaccgtttcctgcgcaccggcgatgtccgccccgacgaggacaccacgctctaccccgtcatgctgggtctgcgtaccaagaatggcatcgacgaggacaccatgctgaccgagcgcgagggcgaatttaaggtgcccgaccttgacttcttcaagctcaacgcggaccactccgccatctaccgcacctcgtacaccccggagcgtctgtccaagctgggtgaggcggccaagggcggacttttgagcgtcgaggaccgcgctggtatgattgccgatgccggtgccttggccgcgtccggcttccagagcacctccggcctgctgtcgctgctgaagggcttcgacagcgaggctgagttcatcgtatggaacgagatcctgactcgtgttggctctctgcgggctgcttggctgttcgaggatgtttccaccagggacgccttgaaggccttccagcgctctctggtcagccacaaggcgcatgagctcggatgggaattctcggagaaggatggccacatcctgcagcaattcaaggctctgatgttcggcagtgctggtatggctgaggacccggtcgtcgtcaaggccgcccaggacatgttccagcagttcgccgccggcgacgagaacgccatccaccccaacattcgcggcagcgtattcagcattgtgctgaagaacggtggcgagaaggagtacaacgtcgtcctcgaccgcttccgcaatgcccccacttccgatgagaagaccacggccctccgctgcctgggtgccgccgaagaccccgccctgatccagcgcactctcgacctggccagcggcgacgaggtcaagaaccaggacatctacatgcccctgggtggtctccgcagccaccctgcgggtatcgaggctcgctggtcttggttgaagaacaactgggatgccatctacaagcgtctgcctccgtctctcggtatgctgggcacggtggtgcagctcagcacagccagcttctgcactgaggagcagttgaaggatgtgcaggactttttccagagcaaggacactaagggcttcgaccgtgccgttgagcagagtctcgactcgatccgggccaaggtcaactgggtcaagcgtgaccgggcggacgtggagtcgtggctcaaggccaacagctacaatggtaagctgtaa

SEQ ID NO: 55 - protein, 881 aa, Aspergillus niger
MCGARRGEVTGSTNVPGGREVLPTNVKPLHYDLTLEPNFANFSYDGTVVIDLDVAEDTTSISLNSNEIKIHNAVVSSQGAVVASNPEITLNQDQQVATIKFADTIPAGSSAQLKLTFTGELNDNMAGFYRSSYKAADGQTKYIATTQMEPTDARRAFPCFDEPALKAKFTVTLVADKSMTCLSNMDVASETEVAGGKKAVKFNTSPVMSTYLLAFIVGHLNYIETKAFRVPIRVYATPDQDIEHGRFSLDLAARTLAFYEKAFDNEFPLPKMDMVAVPDFSAGAMENWGLITYRVVDVLLDEKTSGAARKERIAETVQHELAHQWFGNLVTMDFWDGLWLNEGFATWMSWYSCNSFFPEWKVWQTYVIDTLQGALSLDSLRSSHPIEVPVKRADEINQIFDAISYSKGSSVLRMISKYMGEDVFIQGVRDYIKKHAYGNTQTGDLWAALANASGKPVEEVMDIWTKKVGFPVVTVSENPSNSTIKLKQNRFLRTGDVRPDEDTTLYPVMLGLRTKNGIDEDTMLTEREGEFKVPDLDFFKLNADHSAIYRTSYTPERLSKLGEAAKGGLLSVEDRAGMIADAGALAASGFQSTSGLLSLLKGFDSEAEFIVWNEILTRVGSLRAAWLFEDVSTRDALKAFQRSLVSHKAHELGWEFSEKDGHILQQFKALMFGSAGMAEDPVVVKAAQDMFQQFAAGDENAIHPNIRGSVFSIVLKNGGEKEYNVVLDRFRNAPTSDEKTTALRCLGAAEDPALIQRTLDLASGDEVKNQDIYMPLGGLRSHPAGIEARWSWLKNNWDAIYKRLPPSLGMLGTVVQLSTASFCTEEQLKDVQDFFQSKDTKGFDRAVEQSLDSIRAKVNWVKRDRADVESWLKANSYNGKL

SEQ ID NO: 56 - DNA, 2910 bp, Aspergillus niger
tcgttggggcgaaagggggcatgatgtacacagcctgcctggatgagtggaggcgaagtgatgcgtagcattggatatgtccagttccttccaacttggtgagggaggagagtggctgcgttgaaagcatggtcgtagtcatgctgggggagagcaaatggaagctcgcgtgcgacggtgagagttgggggcggccccaatttagcattcctggttgtaccgaagtttcctagcattgggttaactggaagtttttgtagattagggggttcgtatctgtcgcatagtgaagaggtaccaacacgttctttgtagagtctggtgtcattgggtgatacttgatgcttttcgacgactcctgtcagccctaactgacgctttgggtaagacatgaaccagaaactgttgtcctgatcatgatgtgcatttttatggaatatactgcatattgggagcttcgacacgattgcaatataaacggtcggttcccatgcataatagcttcgatgatcctggtcaggataggaccgggtttctgcattggtggtgaagctgcagaatgcggcccccacacagcaacagggggtgcaaccattcactaagaatagttgactgactccagatcccggctttacccgtcgagtcacgtgatagaacacggagtatcccaggttcgatccctgctctgagcgaattgaccttttgtgattgtcaaccaagtatattgatcacgacattactacacagtgctgataccaccgggtggaactgtgttaaaatcaatgggtgaccgaggcgtgatccgccctaaaaattcaacggcgcagcgagtacccgcaaatgtcacgccatcctgggctgtatgtcggagcgaatggtttttgcggtcactctttctgagcgacaccagttggctcatgagctgggaatgacgagtagaccgaggaggtgagcacaatggaggacacggggaataattgtcaattattggcaagtgcagaaaccagccacgccgggagaccgacggataacgcgacgatcgccgtcccaacctcatcacaccttgctggctggctgggctgattggcaatcgccagttccaccgcttagataaagctcgtcttgcaaagaaaccccgcataagggtctaggagtaataaactcgggggagtcccccgactcttccatcgcacgaccatcatgttcctttcgcttccccttctggggaccttgattgcctccacggttgccctcgactccagccccctggagttgcgggtaccacatctgcaccaactcagccagctcagcaagtctcaccaggcttctctcaaccaggattcagcaagcttcccggtgtacaacctttctgtgcctatagaccatttccacgatgaatcacgctatgagccacacaccaatgccacctttggcctgcgctactggctcgacactagccattaccagcctggaggacccgtttttgtgattgccgcaggcgagaccgatggaagcgaccgtattcccttcctttcacaaggggttgttactcaattagcggcagcctaccatggaattggcctcattctcgaacatcgctattacggcgagagctacccattcaccaaccttactaccgagaacatccgattcttgactaccgagcaggcgctcgccgactatgcttactttgcctcgaacattgtcttccccggtctggaggatctcgatcttacggcagccaccactccatggatcgcctatggcggctcttatgctggtgctttcgtcgctttcctccgcaaactctacccggagctctactggggagcggtgtcttcttctggcgtcacggaagccatcattgattactgggaatactacgaaccgatccgactgtatggcccatctcagtgcatctccaccatacagacgtcaatcgatattgtggatcgcattctcatcgaccatgccgacaataaaaccctggcccagcaactgaaatccgcttttgggggctcagcgaccaacctcagtaaccaggactttgtctcctccctctcctatggtctggactcgtttcagtcccgcaactgggataagaccatcgggacccctctcttccgcgctttctgcaacaacatcaccaattcggacctgctgtaccccgaggccgccgaacccatctctgcatccgtcaagcaattggtccaaattgcaggctacgatccctccaacacgaccctggtcaacaacttcctcaactggattggattcctaagcacctcgaaagttttcgccgactcatcctcggagtcctcatcatccaacatcacgaacttcaccaccccgcagcccctcagcaaggactccggcaccagctggaactaccaagtctgcgttgaatgggggtatttcactacaggctcctctgtgccttcgaccactaagccccttatttctcgtcttctcgacctcccctacctttcgtctttctgcccgaacacattcggaatcaagacaccgccagatgttcagcgaatcaaccaattcggcgggttcaatttctcgtatccgcgcgttgcgataataggcgggctggcggatccgtggcgcgacgcgacaccactagcggacggagtcgactggcagagtcgaaagtcgtctgatagtgagccgattattttgctggatattccggcggcggatgtgtgggatggtgtgagaggtgcggtccatcactgggatcagaacggattgtcgggtcagcagaagaaggagggggagaaggcgcctaaagagattgttagtgtgcatgaggaggtggtgagatttgtgggggtgtggttgaaggagtggaaggggaaacagtctgatgcagatgagagggtgtatcagactgttttgtag

SEQ ID NO: 57 - DNA, 1710 bp, Aspergillus niger
  CDS (1)..(1710)
atgttcctttcgcttccccttctggggaccttgattgcctccacggttgccctcgactccagccccctggagttgcgggtaccacatctgcaccaactcagccagctcagcaagtctcaccaggcttctctcaaccaggattcagcaagcttcccggtgtacaacctttctgtgcctatagaccatttccacgatgaatcacgctatgagccacacaccaatgccacctttggcctgcgctactggctcgacactagccattaccagcctggaggacccgtttttgtgattgccgcaggcgagaccgatggaagcgaccgtattcccttcctttcacaaggggttgttactcaattagcggcagcctaccatggaattggcctcattctcgaacatcgctattacggcgagagctacccattcaccaaccttactaccgagaacatccgattcttgactaccgagcaggcgctcgccgactatgcttactttgcctcgaacattgtcttccccggtctggaggatctcgatcttacggcagccaccactccatggatcgcctatggcggctcttatgctggtgctttcgtcgctttcctccgcaaactctacccggagctctactggggagcggtgtcttcttctggcgtcacggaagccatcattgattactgggaatactacgaaccgatccgactgtatggcccatctcagtgcatctccaccatacagacgtcaatcgatattgtggatcgcattctcatcgaccatgccgacaataaaaccctggcccagcaactgaaatccgcttttgggggctcagcgaccaacctcagtaaccaggactttgtctcctccctctcctatggtctggactcgtttcagtcccgcaactgggataagaccatcgggacccctctcttccgcgctttctgcaacaacatcaccaattcggacctgctgtaccccgaggccgccgaacccatctctgcatccgtcaagcaattggtccaaattgcaggctacgatccctccaacacgaccctggtcaacaacttcctcaactggattggattcctaagcacctcgaaagttttcgccgactcatcctcggagtcctcatcatccaacatcacgaacttcaccaccccgcagcccctcagcaaggactccggcaccagctggaactaccaagtctgcgttgaatgggggtatttcactacaggctcctctgtgccttcgaccactaagccccttatttctcgtcttctcgacctcccctacctttcgtctttctgcccgaacacattcggaatcaagacaccgccagatgttcagcgaatcaaccaattcggcgggttcaatttctcgtatccgcgcgttgcgataataggcgggctggcggatccgtggcgcgacgcgacaccactagcggacggagtcgactggcagagtcgaaagtcgtctgatagtgagccgattattttgctggatattccggcggcggatgtgtgggatggtgtgagaggtgcggtccatcactgggatcagaacggattgtcgggtcagcagaagaaggagggggagaaggcgcctaaagagattgttagtgtgcatgaggaggtggtgagatttgtgggggtgtggttgaaggagtggaaggggaaacagtctgatgcagatgagagggtgtatcagactgttttgtag

SEQ ID NO: 58 - protein, 569 aa, Aspergillus niger
MFLSLPLLGTLIASTVALDSSPLELRVPHLHQLSQLSKSHQASLNQDSASFPVYNLSVPIDHFHDESRYEPHTNATFGLRYWLDTSHYQPGGPVFVIAAGETDGSDRIPFLSQGVVTQLAAAYHGIGLILEHRYYGESYPFTNLTTENIRFLTTEQALADYAYFASNIVFPGLEDLDLTAATTPWIAYGGSYAGAFVAFLRKLYPELYWGAVSSSGVTEAIIDYWEYYEPIRLYGPSQCISTIQTSIDIVDRILIDHADNKTLAQQLKSAFGGSATNLSNQDFVSSLSYGLDSFQSRNWDKTIGTPLFRAFCNNITNSDLLYPEAAEPISASVKQLVQIAGYDPSNTTLVNNFLNWIGFLSTSKVFADSSSESSSSNITNFTTPQPLSKDSGTSWNYQVCVEWGYFTTGSSVPSTTKPLISRLLDLPYLSSFCPNTFGIKTPPDVQRINQFGGFNFSYPRVAIIGGLADPWRDATPLADGVDWQSRKSSDSEPIILLDIPAADVWDGVRGAVHHWDQNGLSGQQKKEGEKAPKEIVSVHEEVVRFVGVWLKEWKGKQSDADERVYQTVL

SEQ ID NO: 59 - DNA, 2852 bp, Aspergillus niger
cccgtgcacgcaaccttccagatgatcggagaagagccatcgcgggctacttagatgtcatccgaggaggaaattcgagcggaaagcgtgttatctcaagcggcctctgcatccacacatgtctcgcagcctcgaaattcttaaaccgtacttcgctcaaactacgttggtggaccaggaaacatttggagttcagagcaagcgcaacgtcttctttctttgctgcccgacaaggggttgaacgaatccttaaggaagagatgggagtcttcgcccgaccgcagcagtgccaataagtgggcggatatcgacgccttggccaagacaggcaagagcagcactctcaaccctactacactgcgagatgccaagcaagacattgttctcgagtacacatatccgcgcctggattctgaagttagcaaaaagatgattcacttgctaaagagtccatttgtcattcaccctggcactggtcgcgtgtgtgttccgatagacgcccgaaaggcggaacaattcgaccccctctcggtacctacagtttcggaactgcttgcggagatcgatgcgtgggatgcggagcatccaagcaccaatgcaggtccggaggtagcagatggcgaaggtagtgtacccgactccgatgctaggggtagtcgcagactgcaagactatgaaaagacgagtctgaagccgtacgtcgactatttccgctcattcattgccgggcttctgaaggaagagcgtacgggcaagcgggaaaggaacgacgatgcgactgaggtcaagaccgagagcatggagttctagacaattccaagtctgacaattttgtgttgttgcgcgtttgactttggtcattgatttggattagcacgtcggatatgatatattcatgggcaacgggattggcgtcattgtgcattgcaaaggttggacatgctggagttacttttcttcttttacgttactagaaccttattcatcattctacgtaaataatctgtctgtttttccgccatatcctcaaatcagtcttcggcaaataagcctgattatcactctaagcttccttgattggcatgcggagctccgacggggaaactcagcatgtcagcctcaaccccgcgcagacaatatattaaagtaagagagaggctttgactcggccatctgcttcttccatgaagccaggcaaacatggcagcagaccacaccaacaccaacccgttagatgagcggttcgaaaccctcgtccaggagacattgaattactggcacgttccaggcatttcaatcgcagtagtcgatggagacaacacctgggccaaggcaggtgtcccatacatctccaatgatcaagataatagacagaactcccatactaacaaacaagcacaggggtacggcattgcgaccttcccctctgagcccgtaaccccttcaacgctcttctatgccggaagcaccacgaaagctttcaccgcagccttgatggccaccttcgtcgaagacaacgacacccatccccaagtacactgggacacgcccatcagccacctcatccgcgacgacttcgtcctacacgacgagcacacaaccgaacacaccaccatcgaagatgccctatcccatcgctcaggcctcccccgtcacgatcaagcctacggcaaccgtctcacccgcgacaaagccgtacgaacaatagtgcgtcagttgcgccatctcccactaaccgctcctccgcgcaccaaactccaatactgcaatctcatgtacgtcgtcgtctctcacgtcatcgagaccctcaccggcggagaatggctaggcgacaccctagctcgcaccatctggcaaccccttgacatgaaatccacattctttgacctcaacaacgccaaagcatcccctcaccacctagcacacggatattaccataccccaagcgacaagggcagcgacagccactaccacgaagtcccctggatgccactagacgaaatctccggcgccggaagcatcatcaccaacgtcctcgattacgcaaaatgggcgcgcgcactacttaaccaaaccgagcctttatcgcccgccgtatacaaagcaatcttcgaaccgcgaactgttctgcctcccgaggcgccgttcacgggcccgcgagcatacgctctgggctggtatacgggcgtataccaaggcgtgcagttcttcgagcatacaggggggatgaatgcgttcggggccgagataatcttattcccgagcttgaagtatgcggttgtcatgttggcgaatacagccgggacgtcgaattacgcgcagaaggcgctggcatttcggttggtggatgagaaacttggtgtgccggttgagaggaggtttgactggaatgcgaagtatgtttgggatcagggctcttttcagggaaaggtggttgatgctaactgtttgatgttaggaatatggcacacatagaagaggagaagaaaaaggccctcgatgctattcataaggtccccgcgcatgtgattccgcactcgttagacctacacgaatatgttgggacgtatgtgcatccgggctatcagactgttgagatttatcttgatcggtcgaaaagtacactacgggctgaccgggatcgtacaacttggccggagtatctgagcttcaaacatgtcaatggggaacattttctcgctatatcggagcatgttggagacttgggggctttctttcctgatgtgtatgcggcggaatttcgaattggggaaaaggggaagccgtccgcgcttggagtggcgtgggagaagactatgaaggagaagatatggtttacgcggtcggattaa

SEQ ID NO: 60 - DNA, 1521 bp, Aspergillus niger
  CDS (1)..(1521)
atggcagcagaccacaccaacaccaacccgttagatgagcggttcgaaaccctcgtccaggagacattgaattactggcacgttccaggcatttcaatcgcagtagtcgatggagacaacacctgggccaaggggtacggcattgcgaccttcccctctgagcccgtaaccccttcaacgctcttctatgccggaagcaccacgaaagctttcaccgcagccttgatggccaccttcgtcgaagacaacgacacccatccccaagtacactgggacacgcccatcagccacctcatccgcgacgacttcgtcctacacgacgagcacacaaccgaacacaccaccatcgaagatgccctatcccatcgctcaggcctcccccgtcacgatcaagcctacggcaaccgtctcacccgcgacaaagccgtacgaacaatagtgcgtcagttgcgccatctcccactaaccgctcctccgcgcaccaaactccaatactgcaatctcatgtacgtcgtcgtctctcacgtcatcgagaccctcaccggcggagaatggctaggcgacaccctagctcgcaccatctggcaaccccttgacatgaaatccacattctttgacctcaacaacgccaaagcatcccctcaccacctagcacacggatattaccataccccaagcgacaagggcagcgacagccactaccacgaagtcccctggatgccactagacgaaatctccggcgccggaagcatcatcaccaacgtcctcgattacgcaaaatgggcgcgcgcactacttaaccaaaccgagcctttatcgcccgccgtatacaaagcaatcttcgaaccgcgaactgttctgcctcccgaggcgccgttcacgggcccgcgagcatacgctctgggctggtatacgggcgtataccaaggcgtgcagttcttcgagcatacaggggggatgaatgcgttcggggccgagataatcttattcccgagcttgaagtatgcggttgtcatgttggcgaatacagccgggacgtcgaattacgcgcagaaggcgctggcatttcggttggtggatgagaaacttggtgtgccggttgagaggaggtttgactggaatgcgaagaatatggcacacatagaagaggagaagaaaaaggccctcgatgctattcataaggtccccgcgcatgtgattccgcactcgttagacctacacgaatatgttgggacgtatgtgcatccgggctatcagactgttgagatttatcttgatcggtcgaaaagtacactacgggctgaccgggatcgtacaacttggccggagtatctgagcttcaaacatgtcaatggggaacattttctcgctatatcggagcatgttggagacttgggggctttctttcctgatgtgtatgcggcggaatttcgaattggggaaaaggggaagccgtccgcgcttggagtggcgtgggagaagactatgaaggagaagatatggtttacgcggtcggattaa

SEQ ID NO: 61 - protein, 506 aa, Aspergillus niger
MAADHTNTNPLDERFETLVQETLNYWHVPGISIAVVDGDNTWAKGYGIATFPSEPVTPSTLFYAGSTTKAFTAALMATFVEDNDTHPQVHWDTPISHLIRDDFVLHDEHTTEHTTIEDALSHRSGLPRHDQAYGNRLTRDKAVRTIVRQLRHLPLTAPPRTKLQYCNLMYVVVSHVIETLTGGEWLGDTLARTIWQPLDMKSTFFDLNNAKASPHHLAHGYYHTPSDKGSDSHYHEVPWMPLDEISGAGSIITNVLDYAKWARALLNQTEPLSPAVYKAIFEPRTVLPPEAPFTGPRAYALGWYTGVYQGVQFFEHTGGMNAFGAEIILFPSLKYAVVMLANTAGTSNYAQKALAFRLVDEKLGVPVERRFDWNAKNMAHIEEEKKKALDAIHKVPAHVIPHSLDLHEYVGTYVHPGYQTVEIYLDRSKSTLRADRDRTTWPEYLSFKHVNGEHFLAISEHVGDLGAFFPDVYAAEFRIGEKGKPSALGVAWEKTMKEKIWFTRSD

SEQ ID NO: 62 - DNA, 2782 bp, Aspergillus niger
cagtgcgaaggctcccccaagccgatagtggtagaacggtagagattcggcaactcgacgagcaactgcaaagctttctttcagaacggataaatacagctaccgcggaaattggccatgattgcagtcctatagcatctgccgtgaggtatgtcagccgtaatctccctgccttgtgacccgaaagggaatggatatccctagtctgaaggaccgcgccactcggctgcagctaactgattctgccagggcgctttgcctattacatcaggaagtcatagagtctccttccaacaccgttgacttgcagagtctgcaatactcacaggcggctctaggaatggtatctaatgtagtggtggatgtcgcgcgccaccacaaagcgcaaattgcgtgccaaaattcccatgccgatctactacccctgagctgctcgtacactctgcacatggcaatgagacatattcgggattgcaggaagctagtctgcccatacagccgctctagcgacctgaactctctagtgcagctggatcaagaattttccgacagatggaaagcctgaatcccctcttcctgcagtgggcatgagcgattttcgtgataggaaaagcggctacggggttggtccaatccaagggcaaagcagaggcccaccgccaagcgaatggccgcaaattccgtccgcaacagcccaatgaaggtgcatcgtcgttatgtcttaaattgcgatggagacggattagattgctcgaatcaggatggaggcccgacggccatcaaccgccgaacatccggctgctcgaccgaattcggagacatggtcggagctaggcgggaatagccgtccaaagtcacgataggtcgcttgtactgtgtagaagtcagaccctttggatccagcgttcgttgtgaatggctccacgcagcctttgctttgaccaatttggggctgagtcacttggtcgatgatgactggctataccagtgcaaagtgtgagcaccatgcttacactattgccttagcctggccgttgaagctgacatgagaggaacaggcagaagagaaatgctgccttgcctcttgggggccaatttaacctccccagactgcggcacatccgtcttggacttgtgcttctttgcaacttacgttataacgagtctgtgaacaggaaaacagacgcccggtcagtcaagatgaaaggtgcggcgctaattcctcttgcggcgggcattccttttgcccatggcctgtctctccataaacgcgacgggcctgccgtcgttcgtatgcccattgagcgcaggagcgcccagtccttgcagaaacgagattctacggtcggtgtgactttgcagaactgggtatgttaagctatacggccgtgaagtatagatcatgctgacaatcgctaggatgcgacctattacgcagtcaacctgacgttaggaacacctgcgcaaaaggtatcattagctttggacactggcagcagcgacctctgggtgaacaccggcaactcaacttactgctcaatcgacaatctatgcaccccttatggcttgtacaatgccagcgaatcgtctactgtaaagaccgtgggcacacacctcaacgatacatatgcggacggcacaaacctttacggtccttatgtgaccgataagctcacgatcggcaacacaacaatcgataatatgcagtttgggatcgccgagtcaacgactagtaaacgtgggtgaaccgtttgtccatgaatgatcgtcgctgactaggtctactataggcgggatcgccggcgtcggttacaagatttcgacctaccaagccgagcatgacgacaaagtctacgccaacctccctcaggccctcgtcgacagcggtgccattaagtctgctgcgtacagcatatggctagatagtttggaggcgtcgactggctccctccttttcggaggtgtcaatacagccaagtacaagggcgatctgcagactcttccgatcattcctgtgtatggcaaatactactccctcgccatcgcccttacggagctcagcgttgcgaccgactccaactccagtagcttcaccgacagtctccccctctctgtgtcactcgatactggcaccaccatgacggcactgcccagcgacctggtcaacaaggtctacgatgcgctcaacgcaacctacgacaagacatacgacatggcctacatcgactgcgacactagagaggcggattacaatgtaacatacagtttctccggggcaacgatcaccgtgagcatgagtgagctgattatccccgcaacggagccggggtggcccgacaacacgtgtgtcttgggcctcgtgcctagccagccgggcgtgaacctgctcggtgatacattcctgcgcagtgcgtacgtcgtgtatgatctcgagaacaacgaaatctctctcgccaataccaatttcaatccaggcgacgatgatatcctcgaaatcggaacgggaacgtctgctgtgccaggagccacaccggttccctctgctgtctcttctgcaactggaaatggactgatctcgtctggcaccgcagtgcccacgctgtcgggtgtcacaataactgctacagccacagcaaccggctcaaccggcactggctctagcggtggttcgtcggctgaagccacgagtacttcctcggagggcgctgcggcgcaagctacgagcaacccgatgaacctgctcccaggacttgcgggtatcggcctacttctcgctctgtaa

SEQ ID NO: 63 - DNA, 1479 bp, Aspergillus niger
  CDS (1)..(1479)
atgaaaggtgcggcgctaattcctcttgcggcgggcattccttttgcccatggcctgtctctccataaacgcgacgggcctgccgtcgttcgtatgcccattgagcgcaggagcgcccagtccttgcagaaacgagattctacggtcggtgtgactttgcagaactgggatgcgacctattacgcagtcaacctgacgttaggaacacctgcgcaaaaggtatcattagctttggacactggcagcagcgacctctgggtgaacaccggcaactcaacttactgctcaatcgacaatctatgcaccccttatggcttgtacaatgccagcgaatcgtctactgtaaagaccgtgggcacacacctcaacgatacatatgcggacggcacaaacctttacggtccttatgtgaccgataagctcacgatcggcaacacaacaatcgataatatgcagtttgggatcgccgagtcaacgactagtaaacgcgggatcgccggcgtcggttacaagatttcgacctaccaagccgagcatgacgacaaagtctacgccaacctccctcaggccctcgtcgacagcggtgccattaagtctgctgcgtacagcatatggctagatagtttggaggcgtcgactggctccctccttttcggaggtgtcaatacagccaagtacaagggcgatctgcagactcttccgatcattcctgtgtatggcaaatactactccctcgccatcgcccttacggagctcagcgttgcgaccgactccaactccagtagcttcaccgacagtctccccctctctgtgtcactcgatactggcaccaccatgacggcactgcccagcgacctggtcaacaaggtctacgatgcgctcaacgcaacctacgacaagacatacgacatggcctacatcgactgcgacactagagaggcggattacaatgtaacatacagtttctccggggcaacgatcaccgtgagcatgagtgagctgattatccccgcaacggagccggggtggcccgacaacacgtgtgtcttgggcctcgtgcctagccagccgggcgtgaacctgctcggtgatacattcctgcgcagtgcgtacgtcgtgtatgatctcgagaacaacgaaatctctctcgccaataccaatttcaatccaggcgacgatgatatcctcgaaatcggaacgggaacgtctgctgtgccaggagccacaccggttccctctgctgtctcttctgcaactggaaatggactgatctcgtctggcaccgcagtgcccacgctgtcgggtgtcacaataactgctacagccacagcaaccggctcaaccggcactggctctagcggtggttcgtcggctgaagccacgagtacttcctcggagggcgctgcggcgcaagctacgagcaacccgatgaacctgctcccaggacttgcgggtatcggcctacttctcgctctgtaa

SEQ ID NO: 64 - protein, 492 aa, Aspergillus niger
MKGAALIPLAAGIPFAHGLSLHKRDGPAVVRMPIERRSAQSLQKRDSTVGVTLQNWDATYYAVNLTLGTPAQKVSLALDTGSSDLWVNTGNSTYCSIDNLCTPYGLYNASESSTVKTVGTHLNDTYADGTNLYGPYVTDKLTIGNTTIDNMQFGIAESTTSKRGIAGVGYKISTYQAEHDDKVYANLPQALVDSGAIKSAAYSIWLDSLEASTGSLLFGGVNTAKYKGDLQTLPIIPVYGKYYSLAIALTELSVATDSNSSSFTDSLPLSVSLDTGTTMTALPSDLVNKVYDALNATYDKTYDMAYIDCDTREADYNVTYSFSGATITVSMSELIIPATEPGWPDNTCVLGLVPSQPGVNLLGDTFLRSAYVVYDLENNEISLANTNFNPGDDDILEIGTGTSAVPGATPVPSAVSSATGNGLISSGTAVPTLSGVTITATATATGSTGTGSSGGSSAEATSTSSEGAAAQATSNPMNLLPGLAGIGLLLAL

SEQ ID NO: 65 - DNA, 1998 bp, Aspergillus niger
ccatgctttgaagcggggctgaagatgttggcgccggggatgcagtggatatcccgacggactccggcccgttgccttttagccacgcctgacccctcatgccggtagttacgcctcttcaggggatgtaattcagactgctaacgcgtttttcacctggggacagactgaggtgcgtgaaataagtggcatttttcgcataaaagcagtgttctactgctccccaatatccaacatttgacgtccagcccaagtccttacagtggaccaaaacccacttcccttggtgtttgattgcatctcgttgccgatagacaagtggatggtgtgaaggctaatttaattgatttctccggagtttgcaggttcggcaaggcacgagccattcaatgacccccattcttcatcctaaatgaagtttatctgccacacacgggacgatccccgcagagccaatagattgtttctctcgttatcatcacgccatgaccacacgtcgtcaccgttgaggatgatagtctgatggccattccgcttgaggcaaagtgtgccccaatgtcacgcggtcagctagtcttctgcaggtctgcagttggacaggggaacttgagtgctattatcgccaaggtgaatgttctctaccgctttgataccagagtgatcgtcccttttgccgtcactcttggtgttgcgaagcagatgtcgttcgtttgcatatgggagccgaagatccacgcagggtgcttgaaaagacatactgcgatcctcccgtttccaagaatgcttgtacacttgaagtttttgtcaagatccccccgcctggccagtcccgagctaagcgaaatgagctttccctcaatgctgcagacaggagacaccatcgctttggcgccttggcaccatcagccaccgtcggtcctatcatcatcgccctggtcaatagggaacgcgtcaattgcgtatctgggtagtgttatctgctcgatattgcaccggcagagcaggaatcgggattggcggatgtagagaaaattcagcttcaaggaggggggaagggagacgctgaaatggtataaaaccacgtccaattccctaccagatagccctcatccagcagcatcaaaagcatcttccactcagactccaagcagctcccagtccctcttcaattcattaccttccaaacatcatcccatcaagatgaagactactgctctcttgaccgccggcctgctggccaccactgctatggccgctcctctgacggccaagcgccaggctgctcgggccaagcgctccacgaaccgccagagcaaccctcccttcaagcctggcaccaacgaggtcctcgcccttaacggcaccaagaatgtggagtacagctccaactgggccggtgccgtcctcattggcactggttacactgccgtgaccgccgagttcgtcgtgcccaccccctccgtgccctccggtggctcgagccgcgaggagtactgtgcctccgcctgggtgggcattgacggtgacacctgtgacactgctatcctccagaccggtgtggacttttgtgtccagggcagcgaggtgagcttcgatgcctggtacgagtggtaccccgactacgcctacgacttcagcggcatctccatctcggccggtgataccatcaaggtcaccgtcgatgccagcagcgacaccaccggtactgccacgattgagaacgtgagcactggtaccacggtcacccacagcttcacgggcggtgttgatggtgatctgtgtgagtacaacgctgagtggatcgtcgaggacttcgaggaggatgactccctcgttccctttgccgactttggcaccgtgactttcaccagctgctccgctaccaaggatggttcctctgttggccctgaggatgctaccatcatcgacatcgagcagaatgaggtgctgacctccgtttccgtctccagtagcgaggtcgttgtcaagtacgtctaa

SEQ ID NO: 66 - DNA, 798 bp, Aspergillus niger
  CDS (1)..(798)
atgaagactactgctctcttgaccgccggcctgctggccaccactgctatggccgctcctctgacggccaagcgccaggctgctcgggccaagcgctccacgaaccgccagagcaaccctcccttcaagcctggcaccaacgaggtcctcgcccttaacggcaccaagaatgtggagtacagctccaactgggccggtgccgtcctcattggcactggttacactgccgtgaccgccgagttcgtcgtgcccaccccctccgtgccctccggtggctcgagccgcgaggagtactgtgcctccgcctgggtgggcattgacggtgacacctgtgacactgctatcctccagaccggtgtggacttttgtgtccagggcagcgaggtgagcttcgatgcctggtacgagtggtaccccgactacgcctacgacttcagcggcatctccatctcggccggtgataccatcaaggtcaccgtcgatgccagcagcgacaccaccggtactgccacgattgagaacgtgagcactggtaccacggtcacccacagcttcacgggcggtgttgatggtgatctgtgtgagtacaacgctgagtggatcgtcgaggacttcgaggaggatgactccctcgttccctttgccgactttggcaccgtgactttcaccagctgctccgctaccaaggatggttcctctgttggccctgaggatgctaccatcatcgacatcgagcagaatgaggtgctgacctccgtttccgtctccagtagcgaggtcgttgtcaagtacgtctaa

SEQ ID NO: 67 - protein, 265 aa, Aspergillus niger
MKTTALLTAGLLATTAMAAPLTAKRQAARAKRSTNRQSNPPFKPGTNEVLALNGTKNVEYSSNWAGAVLIGTGYTAVTAEFVVPTPSVPSGGSSREEYCASAWVGIDGDTCDTAILQTGVDFCVQGSEVSFDAWYEWYPDYAYDFSGISISAGDTIKVTVDASSDTTGTATIENVSTGTTVTHSFTGGVDGDLCEYNAEWIVEDFEEDDSLVPFADFGTVTFTSCSATKDGSSVGPEDATIIDIEQNEVLTSVSVSSSEVVVKYV

SEQ ID NO: 68 - DNA, 3610 bp, Aspergillus niger
tgactctcataagcagtcttctgcggagcaggagtggagggagaaggggtatccggaaattgactgggatacgttcgatgaacgaatcactcggcatttcgcggacctggagacgatcatggtgccggagagtgcctcgttctaccggaatagcctggatacggcgttgaagaccggacaggctaagaacttccgtctgtcgctggacggagacggattggaaaagatctcgtgtggatattacgggactcgaggggctgggaaaatgtacgccccacccttccatctacttgatatggctctatacgggtaggctaattgaaacaggctacaagcgatcacagcgcgatatgggcggaagctccgtcggttagcggccgatgatcagattgtgaagatggccgggcccgtcggatatgcgcaggcggtgctggtgccagagttggcggtgcgactggtcaaagaggacatgggagtgaatgaggagacggcacggcaaattctccgtgagacaattgatctcggggagaaggtgaacttcgccttgaatgacgaggtgccagtgccggaggagtctgacgcagaagtgcagtgagatgcaggtaggagtagtggtggtgatgtgttttggaagggattattattcttatactggtcggactctgttcattggactgtccagtgaccaatgctatgttgtatataaggcgatgagtgatacctctctgttagctagtctgttgtgttgtgttgtaatttagccgggagaattgtctcatatggcgcttgctggagacgaattgacaccattacgactccacagttggtgatgcttcaagtccggccgaggtggagccggcgataagatagcggagactgctgattagctgatagccttggttacgtcgtgcggagctgcccgaaacccttccttccattgcaagtaagtagctggtctagtcactactaagtactactgcttactgcagtaagttactcctcacctccatctctctctctctctctctctctgactctctgactcttactcttactcttgctcttccttcatccacacttccatctcccctctttcatgagatggatagtattccattctatctcttatccctctaatcccttatcccaatcatgccccccgaaatgcgggaaaaggcccatgcctatcactactccacaatgcccagcgaatccacgcctctcctcaccacggtcggcatccgtccccatcgtcgtcgctacccacaccacactctccgccgtttctgcaccatcattctcacctccattcttaccctctccctctgtctcttcttgacccccaccgccctccttccccgcgcccacggctccatctggagctacctcccctgggcaaaccccttcccccactcctcctggcctgaaggccacggcctgagctacgctgaactccaagccatcttgaaagaaacccccagcgccgaaaaggctcgcgaatggagcacttactacaccgctggtccgcacctggccgggaagaacctcagccaggcagtctggaccaaggaacgctgggcggagttcggagtcccggagaccgatatcgtagcatatgatatctttctcaattaccctgtcgatcatcggttggcattgctgaagaaagacgaggtcgtgtttgaggcaaccttggaagaggacgtgctcgaggaggaccataccagcggattgccgaaccgcgtccctgtgtttcacggctactcggccagtggaaatgtcacggcgccatatgtgtttgtgaactatggcactgtggacgatttccaggacctcgtggaccggaatgtcagtctcggaggtaaaattgctattgccaagtatggacgcatcttccgcggattgaaggtcaagagagcgcaggaattgggcatgtctggagtgattctgtatgatgatcccgagtcggatggggagattatcgaggaaaatggctatgctccgtatccggaggggccggccaggaacccgagtgctgttcagaggggaagtacccagtttttgagtaagttatcctatcttccgcctgcttgttggatggagaagctaaactgagtaggtatcgcaccgggtgacccaactacccccggatacccatccaagccgggctgtgatcgccaggacccgtatgagtccatccccttgattccttctctgcccatctcataccaggaggtggtgccgttgctaaaggccctgaatggccacggtcccaaggcgtctgacttcaacgaatactggcaaggcggtaagctgggcagcaagggcgtcgagtactacattggcccgaccccggatgatgttcaaatcaatctgtacaatgaacaggagtacgtgacgactcctctgtggaacgtcattggcattatcaagggtgccatcccggacgaggtcgtgatcatgggcaaccaccgcgatgcctggattgccggtggcgctggagatccgaacagcggatctgccgctctcaacgaagttgtgcgcagcttcggcgaagcgcttaaggccggatggaagccgctccgaaccattgtctttgccagctgggacggtgaagagtacggattgctgggttctaccgagtgggtggaagagcatctgccctggttgtccaaggccaacattgcctatctcaacgtggacgtagcggcgtcgggaacgagcttgcgcccgagggccagcccgctgctgaacaagctgatctacgaggtcactggtctagtgaagtcgcccaaccagactgtgcctggacagacagtccgggacctctgggacggcgacattgccaccatgggcagtggcagtgactttacggccttccaggactttgcgggtgtggcaagctacgacctcggattcagccgcggtccgaaggacccggtttaccactaccactcgaactacgacagcttcgactggatggaccggttcggcgacccgggctggaagtaccatgaagcaaccaccaagatctgggctctggcagcggccaagctggtggagacgccggtggtggccttcaatgctacggactacgcgctgggcctggagaagtatcttgacaagatcaagccggcggcgaagcaactccccgaggggacatcgttcgactttggtccgctcgacgcggcgatcgcggagtttcaagcggtgtccgcgaaatttgacgcttacgcggcggatctgagcgcgcagctgggcgacgatgtgccgtggtaccactggtggaagaaggtgcggctctacttccagatccgcatcgtcaacgacaagtacaagggcattgaacgacagttcctgtaccagccgggcctggacgggcgcagctggtttaagcacgtagtgtttgcaccgggcatctggacgggatactcaggcgcgacgtatcccggattggtggagagcttggaagcgggtgatttgctgaattctcaggtgagtaacccagtacctacctcgctgatttaattttcagcggctaatggggttctagaaatggcgcgcgatcatcatcgagcgcattgaggctgcgacgaagctactgcagtga

SEQ ID NO: 69 - DNA, 2298 bp, Aspergillus niger
  CDS (1)..(2298)
atgcccagcgaatccacgcctctcctcaccacggtcggcatccgtccccatcgtcgtcgctacccacaccacactctccgccgtttctgcaccatcattctcacctccattcttaccctctccctctgtctcttcttgacccccaccgccctccttccccgcgcccacggctccatctggagctacctcccctgggcaaaccccttcccccactcctcctggcctgaaggccacggcctgagctacgctgaactccaagccatcttgaaagaaacccccagcgccgaaaaggctcgcgaatggagcacttactacaccgctggtccgcacctggccgggaagaacctcagccaggcagtctggaccaaggaacgctgggcggagttcggagtcccggagaccgatatcgtagcatatgatatctttctcaattaccctgtcgatcatcggttggcattgctgaagaaagacgaggtcgtgtttgaggcaaccttggaagaggacgtgctcgaggaggaccataccagcggattgccgaaccgcgtccctgtgtttcacggctactcggccagtggaaatgtcacggcgccatatgtgtttgtgaactatggcactgtggacgatttccaggacctcgtggaccggaatgtcagtctcggaggtaaaattgctattgccaagtatggacgcatcttccgcggattgaaggtcaagagagcgcaggaattgggcatgtctggagtgattctgtatgatgatcccgagtcggatggggagattatcgaggaaaatggctatgctccgtatccggaggggccggccaggaacccgagtgctgttcagaggggaagtacccagtttttgagtatcgcaccgggtgacccaactacccccggatacccatccaagccgggctgtgatcgccaggacccgtatgagtccatccccttgattccttctctgcccatctcataccaggaggtggtgccgttgctaaaggccctgaatggccacggtcccaaggcgtctgacttcaacgaatactggcaaggcggtaagctgggcagcaagggcgtcgagtactacattggcccgaccccggatgatgttcaaatcaatctgtacaatgaacaggagtacgtgacgactcctctgtggaacgtcattggcattatcaagggtgccatcccggacgaggtcgtgatcatgggcaaccaccgcgatgcctggattgccggtggcgctggagatccgaacagcggatctgccgctctcaacgaagttgtgcgcagcttcggcgaagcgcttaaggccggatggaagccgctccgaaccattgtctttgccagctgggacggtgaagagtacggattgctgggttctaccgagtgggtggaagagcatctgccctggttgtccaaggccaacattgcctatctcaacgtggacgtagcggcgtcgggaacgagcttgcgcccgagggccagcccgctgctgaacaagctgatctacgaggtcactggtctagtgaagtcgcccaaccagactgtgcctggacagacagtccgggacctctgggacggcgacattgccaccatgggcagtggcagtgactttacggccttccaggactttgcgggtgtggcaagctacgacctcggattcagccgcggtccgaaggacccggtttaccactaccactcgaactacgacagcttcgactggatggaccggttcggcgacccgggctggaagtaccatgaagcaaccaccaagatctgggctctggcagcggccaagctggtggagacgccggtggtggccttcaatgctacggactacgcgctgggcctggagaagtatcttgacaagatcaagccggcggcgaagcaactccccgaggggacatcgttcgactttggtccgctcgacgcggcgatcgcggagtttcaagcggtgtccgcgaaatttgacgcttacgcggcggatctgagcgcgcagctgggcgacgatgtgccgtggtaccactggtggaagaaggtgcggctctacttccagatccgcatcgtcaacgacaagtacaagggcattgaacgacagttcctgtaccagccgggcctggacgggcgcagctggtttaagcacgtagtgtttgcaccgggcatctggacgggatactcaggcgcgacgtatcccggattggtggagagcttggaagcgggtgatttgctgaattctcagaaatggcgcgcgatcatcatcgagcgcattgaggctgcgacgaagctactgcagtga

SEQ ID NO: 70 - protein, 765 aa, Aspergillus niger
MPSESTPLLTTVGIRPHRRRYPHHTLRRFCTIILTSILTLSLCLFLTPTALLPRAHGSIWSYLPWANPFPHSSWPEGHGLSYAELQAILKETPSAEKAREWSTYYTAGPHLAGKNLSQAVWTKERWAEFGVPETDIVAYDIFLNYPVDHRLALLKKDEVVFEATLEEDVLEEDHTSGLPNRVPVFHGYSASGNVTAPYVFVNYGTVDDFQDLVDRNVSLGGKIAIAKYGRIFRGLKVKRAQELGMSGVILYDDPESDGEIIEENGYAPYPEGPARNPSAVQRGSTQFLSIAPGDPTTPGYPSKPGCDRQDPYESIPLIPSLPISYQEVVPLLKALNGHGPKASDFNEYWQGGKLGSKGVEYYIGPTPDDVQINLYNEQEYVTTPLWNVIGIIKGAIPDEVVIMGNHRDAWIAGGAGDPNSGSAALNEVVRSFGEALKAGWKPLRTIVFASWDGEEYGLLGSTEWVEEHLPWLSKANIAYLNVDVAASGTSLRPRASPLLNKLIYEVTGLVKSPNQTVPGQTVRDLWDGDIATMGSGSDFTAFQDFAGVASYDLGFSRGPKDPVYHYHSNYDSFDWMDRFGDPGWKYHEATTKIWALAAAKLVETPVVAFNATDYALGLEKYLDKIKPAAKQLPEGTSFDFGPLDAAIAEFQAVSAKFDAYAADLSAQLGDDVPWYHWWKKVRLYFQIRIVNDKYKGIERQFLYQPGLDGRSWFKHVVFAPGIWTGYSGATYPGLVESLEAGDLLNSQKWRAIIIERIEAATKLLQ

SEQ ID NO: 71 - DNA, 2694 bp, Aspergillus niger
tagatgatggctagtatcccatgtcctgcatcaaaatccgtcatatggtcaagataacaagtccagtgcaagtccaatacccctttcaaggcgagcatgatagcaaaagttttgcttaatataacggtagcactagcccctcgatccaccctatacgaagtggatatcgcagttcacggccaggatgcgaatcagggtcttgccaagcgctctttgatctctaggcgaacgggccgataaccacgaaggaggcgctattgtcagggattaaattgcattgtactgtgcaaaggcccgttgaactaggctgtgaaaccgacaaactcaaatgccccaaatgctaacctggaatagtagctgttctgttcttgttccagtcgaaggatggttagctaaccgcgacggcttattaactaactctagtcgaccgcgcggatgacagcttgtcattggataagggggaacaagtccgcggtgactaacaaagaagttttagcgctggacgaagaatcgggtgcctccgcctgcatccgaggatgcgaggccacgccatcccactttgggtttgtcgtcactctggctgggtgtgcagtgttgaacagcatttagttgtgatctcaatcgcaaatggacaggagatgatattcatgtcataatcagagtgccatgtcagcgaccatgtcttgccaagagtcatcatttccggtaaaaccgacggaggtaaaaccccggtcattcactagttcgagggagggaatagtctcgcaggtctcttcttctttcttcctcggggtggcggatggatcacttcttcatttgatggttgcctgccaacgacccacttgactaggtttcccccttgatgggattcgttggttttaccagacagagcctcttcacagcccagcgcgtgttccgcaaaagcaacagcccaagggtctgaaggctgacattggagcgggtctgacgcaggatggcttgctgttaaaaaaactcaggaacaggccaagacgaagcgaccgcgcaaggctgagcagttctccgatttccccgtgcccctcctgcgcctcccatgggcgacttttgatcccagatccatcgtttctgcaccgaccatataagaagctccgcacccccaaactcccctggcaagttcctgcccccaaattacgtgagacagggaaccatcacagcaacaccatgaagagcaccactcttctttccttggcctgggctgcccagtccgcctattccctctctatccacgagcgcgatgaacccgctactcttcagttcaactttgaacgtcgtcagatcgccgaccggtcccgtcggaagcgatcgacggcctcggccgacctcgttaacctggtatgttcccatcccgagtctcaaatcaggggaattatgacggtcgctaatgcaggtttctaggctacgaatcttggctacacgatgaacctcacactcggcactcccggccaggaagtcagtgtgacgttggacaccggcagcagcgatctctgggtcaatggggccaactcgtccgtctgcccctgtaccgattacggctcttacaactcaagcgcttcttccacctacaccttcgtgaacgatgagttttatatccagtatgtcgacggcagtgaagccacaggcgactatgtcaacgatactctaaagttctccaatgtgactttgacgaactttcaatttgccgtcgcatatgacggcgactccgagggtaagtcttcgctattccctcactttcattttacactttgctaacggttttaccatgcagagggggtcctcggtatcggatacgccagcaatgaagccagccaggccaccgtcggtggtggtgaatacaccaacttccccgaagccctcgtcgatcaaggcgcgatcaactggccggcctacagtctatggctcgatgacctcgacgaaggaaaaggcaccattctgttcggcggagtcaacaccgccaagtactacggcagcctgcagaccctgcctatcgtctccatcgaagacatgtacgtcgagttcgcggtcaacctgacggccgtgcaccttgagaagaacggcaactccgtctcggtcaacaacagcgccacgcaattccccatccccgccgtgctggacagcggcacggccctgacctacatcccgacctccgccgcagccagcatctacgaggccgtcggtgcccaatacctgagcgagtacgggtacggagtgatcgagtgcgacgtcaaggacgaagacttcaccttcctgttcgactttggatccttcaacatgagcgttgacatcagcgagatgatcctcgaggccagttccgacatgaccgacatgaacgtttgtacgtttggcctcgcagtgatcgaaaatgaggccctgctgggcgataccttcctgcgcagcgcatacgtcgtctacgatctcggaaacaacgagatctccctggccaaggccaacttcaaccccggcgaggaccacgtcctggagatcggcaccggatcggatgccgtgcccaaggcgacgggggcgacggcgaccggcgcggcagccacatccacggcctcgagcgacaagtcggacaaggagagttcggctacagtgccgcgcagccagattgtctcgctggtggcgggagtcttggtcggtgttttcttggttctgtaa

SEQ ID NO: 72 - DNA, 1371 bp, Aspergillus niger
  CDS (1)..(1371)
atgaagagcaccactcttctttccttggcctgggctgcccagtccgcctattccctctctatccacgagcgcgatgaacccgctactcttcagttcaactttgaacgtcgtcagatcgccgaccggtcccgtcggaagcgatcgacggcctcggccgacctcgttaacctggctacgaatcttggctacacgatgaacctcacactcggcactcccggccaggaagtcagtgtgacgttggacaccggcagcagcgatctctgggtcaatggggccaactcgtccgtctgcccctgtaccgattacggctcttacaactcaagcgcttcttccacctacaccttcgtgaacgatgagttttatatccagtatgtcgacggcagtgaagccacaggcgactatgtcaacgatactctaaagttctccaatgtgactttgacgaactttcaatttgccgtcgcatatgacggcgactccgaggagggggtcctcggtatcggatacgccagcaatgaagccagccaggccaccgtcggtggtggtgaatacaccaacttccccgaagccctcgtcgatcaaggcgcgatcaactggccggcctacagtctatggctcgatgacctcgacgaaggaaaaggcaccattctgttcggcggagtcaacaccgccaagtactacggcagcctgcagaccctgcctatcgtctccatcgaagacatgtacgtcgagttcgcggtcaacctgacggccgtgcaccttgagaagaacggcaactccgtctcggtcaacaacagcgccacgcaattccccatccccgccgtgctggacagcggcacggccctgacctacatcccgacctccgccgcagccagcatctacgaggccgtcggtgcccaatacctgagcgagtacgggtacggagtgatcgagtgcgacgtcaaggacgaagacttcaccttcctgttcgactttggatccttcaacatgagcgttgacatcagcgagatgatcctcgaggccagttccgacatgaccgacatgaacgtttgtacgtttggcctcgcagtgatcgaaaatgaggccctgctgggcgataccttcctgcgcagcgcatacgtcgtctacgatctcggaaacaacgagatctccctggccaaggccaacttcaaccccggcgaggaccacgtcctggagatcggcaccggatcggatgccgtgcccaaggcgacgggggcgacggcgaccggcgcggcagccacatccacggcctcgagcgacaagtcggacaaggagagttcggctacagtgccgcgcagccagattgtctcgctggtggcgggagtcttggtcggtgttttcttggttctgtaa

SEQ ID NO: 73 - protein, 456 aa, Aspergillus niger
MKSTTLLSLAWAAQSAYSLSIHERDEPATLQFNFERRQIADRSRRKRSTASADLVNLATNLGYTMNLTLGTPGQEVSVTLDTGSSDLWVNGANSSVCPCTDYGSYNSSASSTYTFVNDEFYIQYVDGSEATGDYVNDTLKFSNVTLTNFQFAVAYDGDSEEGVLGIGYASNEASQATVGGGEYTNFPEALVDQGAINWPAYSLWLDDLDEGKGTILFGGVNTAKYYGSLQTLPIVSIEDMYVEFAVNLTAVHLEKNGNSVSVNNSATQFPIPAVLDSGTALTYIPTSAAASIYEAVGAQYLSEYGYGVIECDVKDEDFTFLFDFGSFNMSVDISEMILEASSDMTDMNVCTFGLAVIENEALLGDTFLRSAYVVYDLGNNEISLAKANFNPGEDHVLEIGTGSDAVPKATGATATGAAATSTASSDKSDKESSATVPRSQIVSLVAGVLVGVFLVL

SEQ ID NO: 74 - DNA, 5057 bp, Aspergillus niger
gtaagtctacttgcgcgcccttgaacagaaaaagaagacgaagagtgtctgccaaaatagagcacagctaacgtaacgagcaaaacaggcaatacacgaaagtcccatcccagctccgggaccacgaagtgctgccgggcttttcggagataccttcaattataaccacgatacggcatccccgacgacgcgctatttcgatcggtccgcagtcagaagctgatgcgtatgagacactggcctatcgcgagaaacggagacgggaaagtctttcaacagccaaccaagcatctccagtgccggaagaaggtggaccggtttcggagtccgagccacggaaactgtcgcgaaagccgtctaagttacacgagtatgagaatatgatgggcacaggtgcccctgctgtggcgagttctgtcgatgttagctcacaagaagcttcttcgaccgtgccctttcctccgtttgagtcggaaattgaagccgacgagaaggaagtgttttcgcagatcaaacagccccgggtgcgctatgatgtagaggttgtaacgaaacttgttgtatattccggtaggtcaacccctgtgcgtcgagttataaagttgcggatgctgactgtgtttgactaggcattgcctggattgtgatggagggagcgccttggttcttcgatcggatagggctggcgccatagtagcttagtagtcgctgggtgggtccgacggccatcacccatttcgaattctgtaaaccttttgctatattctctacggttcagcgggctggactaaccaaagtccttggtgtataacatagctgccgttcttgtacatacaccgttgatgatctcttttctatttgttcttaaaaggtgggatatttagccattagtggaggcgaatgagagttgatactagtagtagtatttctagtagggagtctaaaattttaaggtggtggtttagtctagttggctattattgatccttgataaggaacgagaacggactagtagcgatctactggtagctaattgtggaagttgagccaagttgccgatggatgtggatgtggatgtggatgaatagtgtgatatatgtgtataggcagaacaggaagagtagtcaatagtctaagcactgtactgatatcctataccgagtcctagagaatgaagatatgacgagttgaggaggaaccatggatcgcatgttcactgtttggtgggaatacccgcagaaagtgaacagcaaatgcatagtccatccgccagccggcacacaccacgtgacatgctggatgaggaaaagtggccgccaagctccctcggaagttgaactgatctgctgctgctccattacttgcttcgtctcttcctcaacttctcgcggcttcatcgcctcccctccgtctttgcgccttcctcgcccctcgcccaccccgcgctccccccgcgcgttcctatggagctccaattcactgcggcgacgcgcgcgacttccaccatcactatggcagtcgcccatggctgccctcagtgaatacatttgttttggttcttccttccctttcgctcaccccggcgccgctcttgttttcttcttcaccctgctcttccttctcttcttcttcttcttcttcttctttcccttctctcctatcacccatcttcccattaccttcagacgcgtttacgagcttagcgaatacagcaactttccattcctcgcgatcgaactcgtaccgcttctttcaccacttctttcacccaaagaacttgtttctagattacttctcaccatgtctggggttttctcgactatgagacccagcgtggaggaccacccaatgcctgacgtatgctatatgccctcagattcggcgccccacgaggaggccgtcgataataccgcccatgaccccatggattgtgctcccgattcccccgcatctaacatccctcaggaaactgccaaagccccctccgcagagattccaaagtatcagctccgatccgtgcatgttcccggcaatccaaaggctgtgagactcaatggaaaacatgaagtcaagccctccttccccctccgcaccccgctcatcagacccgatcatcgtttctccccgaatagtcgcgcggcctcattcctcggcgttgatgccctccagaagagcggtcgtaatgcgcattcatctcatcttttaagccatctgggtaccagcaaatatctatctgccggcctgaaccacgtctcctggtcgaataacaaacctctcagcctcccttttggtccagacaggtcaaatgaaaccggttaccttcttggaggcaagtctattggtatagacaagaaaacttttcatatgaatgtcaataaacattctggctttactacgccttctcgcaagagatcaatggaaggtgatggctatgagcaagctcaacccatcacttcaccttctgctaaattccgtcgtgtgagggctggtagctttgcacgcagtgctgctactgaacttgaggccactgccaacgaagatgattggtaccctggttcccccatggacatcgacactcctgaacacaacaacgaaccaaacatggttacagcccttgcggcagttgaatctcatctcgctcttcctgaaacctctcctaagtcgcgtcgactggacgcttccaaagtcaagcctgtcaccgctcttgcggtctcgaccacccctagcactccagagaaccatatgatgcctggagcgtggcccgaatcagtgccgtctcactggtccaccgatgccgccaccgatatcgaagatagccctatgatttccgatgaagagatcctatccaacaatacggacatggccgacgctggagagccgactattcccgtgaattcggacgccgaaccacagccttcctcaccttggtatgcttactgggggacgtggcatagctacttgcagacagttgtctccattcccactggaattactcagaacttttcctatgcggcaaggtccgctgcgaatgcggttggtgctgctaggcgacgcgtgtgcgcactttggaatcgccgcggtggacgtcgtcttccttcgcctcctggatcgcccacgcgcctcaaccttcgcaacctttctccggaacagcaggagcgtgtggatcgtgataggagaatccgaagcggacaatccagcccccgtaccgacaaatctttccccgacttctccaacgttcctaatttctcccataacaacaacacggctcctacagtcgagtcttctcagattttgcaggaccttgtgtctcaggagcagatgccccaggcactcagtgactctgtatctgttcagcgacgtgctcatgagccaaagaatgtgggaactcgcaaacaccctgggatgccgccagtgaaacagccagctcggagatcccctccacgctcggctcagcgttcagctcaacgttcaactcaagacacagcccaaaagcctctccgtcggcaaggaagcccgggtattcgcaagcaaaagcacattacgcgtgctgagcgcgccgagaaccgtgagcgatctgctgcgttcagagccctcttcgttggggacatcgccggcatgaagaaagctatggaggctcaggccgcgcgtgaccgtcaagcctccgccgcaggtcgccgtccggttgaactaaacttgatgagaagcagctatgaactagacagagctcaagacttgaacatgttggcgaatgttcagtctcgctcgtttactgcagttgatcaactgggtgcaactgaaaaggttctctcatcatcaatcactgttgcacccaagacaattctcaagataagaggaaggcccagcatttctgggaatagaactagatctcgccgcgccactccgcgcagggttcgcttccgcgagcctgtggtagccgagttcattgacgacacgcgagattggggtgaggtggaggacaacctggcaccccatctcggagatacgcttgatgtcaatgagagaactaccgaaaccagtgttggcacgaaagccgagtacacagaaaaggaaaacgtgccgccagccctggagaacgaggaagagaatgagcccatcgttgacccctggtcccaaccaacctttgagttcccgctgggtcgagcagtatcagctgtcagtctattttatcccgagccaaaacccattccagagggcagaaccgagtctgtgtacgccgaccgttggagacagatccaagaagaagagaggcagaaagcgctcccatcacgtattaaaccggatggtccagctgtacggcctctctctcccgaatgggaagctcaaataaaaaaaaacttcaagatgggcgcgtatccggaggaaaaaccgtcgcgaccaccctctccggtgaccctctaacgaagaggagcctcgccacctgttacacgcgcggcgagtggcttaacgacgaggtgatcaacggataccttgccctcatcgttgattacctccgacgcaagaaccacaacgccggccgcaacgacaagccccgattccatgccttcaattcgtttttcttttcgaatctcagagacaaaggctacgagtccgtggcccggtgggccaaacgggccaagatcggcggctcactcctcctcgacgtagacaccgtctatatcccggtccacaacagccagcactggacgctggttgttgtgcgaccgggggaacgctcaatcgagcatttcgattctcttggggcccggtctcgccgccacatcgcggtagtccaaacttggctccgcggcgagctgggccccaagtacgtcgaggaggagtggcgcgtgttgccgtccctgtccccccagcaagacaatggttcagattgcggggtcttcctcctcaccacggccaaggctgtggccatcggcctcgagccactgtcttacggcgcgcaagacacaccgctcttgcgccgtaagatagtggccgagctgatggccggcggcctggagggggaatttgaccccgcccagcaagaccatgtcttgctatga

SEQ ID NO: 75 - DNA, 3783 bp, Aspergillus niger
  CDS (1)..(3783)
atggatcgcatgttcactgtttggtgggaatacccgcagaaagtgaacagcaaatgcatagtccatccgccagccggcacacaccacgtgacatgctggatgaggaaaagtggccgccaagctccctcggaagttgaactgatctgctgctgctccattacttgcttcgtctcttcctcaacttctcgcggcttcatcgcctcccctccgtctttgcgccttcctcgcccctcgcccaccccgcgctccccccgcgcgttcctatggagctccaattcactgcggcgacgcgcgcgacttccaccatcactatggcagtcgcccatggctgccctcagtgaatacatttgttttggttcttccttccctttcgctcaccccggcgccgctcttgttttcttcttcaccctgctcttccttctcttcttcttcttcttcttcttctttcccttctctcctatcacccatcttcccattaccttcagacgcgtttacgagcttagcgaatacagcaactttccattcctcgcgatcgaactcgtaccgcttctttcaccacttctttcacccaaagaacttgtttctagattacttctcaccatgtctggggttttctcgactatgagacccagcgtggaggaccacccaatgcctgacgtatgctatatgccctcagattcggcgccccacgaggaggccgtcgataataccgcccatgaccccatggattgtgctcccgattcccccgcatctaacatccctcaggaaactgccaaagccccctccgcagagattccaaagtatcagctccgatccgtgcatgttcccggcaatccaaaggctgtgagactcaatggaaaacatgaagtcaagccctccttccccctccgcaccccgctcatcagacccgatcatcgtttctccccgaatagtcgcgcggcctcattcctcggcgttgatgccctccagaagagcggtcgtaatgcgcattcatctcatcttttaagccatctgggtaccagcaaatatctatctgccggcctgaaccacgtctcctggtcgaataacaaacctctcagcctcccttttggtccagacaggtcaaatgaaaccggttaccttcttggaggcaagtctattggtatagacaagaaaacttttcatatgaatgtcaataaacattctggctttactacgccttctcgcaagagatcaatggaaggtgatggctatgagcaagctcaacccatcacttcaccttctgctaaattccgtcgtgtgagggctggtagctttgcacgcagtgctgctactgaacttgaggccactgccaacgaagatgattggtaccctggttcccccatggacatcgacactcctgaacacaacaacgaaccaaacatggttacagcccttgcggcagttgaatctcatctcgctcttcctgaaacctctcctaagtcgcgtcgactggacgcttccaaagtcaagcctgtcaccgctcttgcggtctcgaccacccctagcactccagagaaccatatgatgcctggagcgtggcccgaatcagtgccgtctcactggtccaccgatgccgccaccgatatcgaagatagccctatgatttccgatgaagagatcctatccaacaatacggacatggccgacgctggagagccgactattcccgtgaattcggacgccgaaccacagccttcctcaccttggtatgcttactgggggacgtggcatagctacttgcagacagttgtctccattcccactggaattactcagaacttttcctatgcggcaaggtccgctgcgaatgcggttggtgctgctaggcgacgcgtgtgcgcactttggaatcgccgcggtggacgtcgtcttccttcgcctcctggatcgcccacgcgcctcaaccttcgcaacctttctccggaacagcaggagcgtgtggatcgtgataggagaatccgaagcggacaatccagcccccgtaccgacaaatctttccccgacttctccaacgttcctaatttctcccataacaacaacacggctcctacagtcgagtcttctcagattttgcaggaccttgtgtctcaggagcagatgccccaggcactcagtgactctgtatctgttcagcgacgtgctcatgagccaaagaatgtgggaactcgcaaacaccctgggatgccgccagtgaaacagccagctcggagatcccctccacgctcggctcagcgttcagctcaacgttcaactcaagacacagcccaaaagcctctccgtcggcaaggaagcccgggtattcgcaagcaaaagcacattacgcgtgctgagcgcgccgagaaccgtgagcgatctgctgcgttcagagccctcttcgttggggacatcgccggcatgaagaaagctatggaggctcaggccgcgcgtgaccgtcaagcctccgccgcaggtcgccgtccggttgaactaaacttgatgagaagcagctatgaactagacagagctcaagacttgaacatgttggcgaatgttcagtctcgctcgtttactgcagttgatcaactgggtgcaactgaaaaggttctctcatcatcaatcactgttgcacccaagacaattctcaagataagaggaaggcccagcatttctgggaatagaactagatctcgccgcgccactccgcgcagggttcgcttccgcgagcctgtggtagccgagttcattgacgacacgcgagattggggtgaggtggaggacaacctggcaccccatctcggagatacgcttgatgtcaatgagagaactaccgaaaccagtgttggcacgaaagccgagtacacagaaaaggaaaacgtgccgccagccctggagaacgaggaagagaatgagcccatcgttgacccctggtcccaaccaacctttgagttcccgctgggtcgagcagtatcagctgtcagtctattttatcccgagccaaaacccattccagagggcagaaccgagtctgtgtacgccgaccgttggagacagatccaagaagaagagaggcagaaagcgctcccatcacatgggcgcgtatccggaggaaaaaccgtcgcgaccaccctctccggtgaccctctaacgaagaggagcctcgccacctgttacacgcgcggcgagtggcttaacgacgaggtgatcaacggataccttgccctcatcgttgattacctccgacgcaagaaccacaacgccggccgcaacgacaagccccgattccatgccttcaattcgtttttcttttcgaatctcagagacaaaggctacgagtccgtggcccggtgggccaaacgggccaagatcggcggctcactcctcctcgacgtagacaccgtctatatcccggtccacaacagccagcactggacgctggttgttgtgcgaccgggggaacgctcaatcgagcatttcgattctcttggggcccggtctcgccgccacatcgcggtagtccaaacttggctccgcggcgagctgggccccaagtacgtcgaggaggagtggcgcgtgttgccgtccctgtccccccagcaagacaatggttcagattgcggggtcttcctcctcaccacggccaaggctgtggccatcggcctcgagccactgtcttacggcgcgcaagacacaccgctcttgcgccgtaagatagtggccgagctgatggccggcggcctggagggggaatttgaccccgcccagcaagaccatgtcttgctatga

SEQ ID NO: 76 - protein, 1260 aa, Aspergillus niger
MDRMFTVWWEYPQKVNSKCIVHPPAGTHHVTCWMRKSGRQAPSEVELICCCSITCFVSSSTSRGFIASPPSLRLPRPSPTPRSPRAFLWSSNSLRRRARLPPSLWQSPMAALSEYICFGSSFPFAHPGAALVFFFTLLFLLFFFFFFFFPFSPITHLPITFRRVYELSEYSNFPFLAIELVPLLSPLLSPKELVSRLLLTMSGVFSTMRPSVEDHPMPDVCYMPSDSAPHEEAVDNTAHDPMDCAPDSPASNIPQETAKAPSAEIPKYQLRSVHVPGNPKAVRLNGKHEVKPSFPLRTPLIRPDHRFSPNSRAASFLGVDALQKSGRNAHSSHLLSHLGTSKYLSAGLNHVSWSNNKPLSLPFGPDRSNETGYLLGGKSIGIDKKTFHMNVNKHSGFTTPSRKRSMEGDGYEQAQPITSPSAKFRRVRAGSFARSAATELEATANEDDWYPGSPMDIDTPEHNNEPNMVTALAAVESHLALPETSPKSRRLDASKVKPVTALAVSTTPSTPENHMMPGAWPESVPSHWSTDAATDIEDSPMISDEEILSNNTDMADAGEPTIPVNSDAEPQPSSPWYAYWGTWHSYLQTVVSIPTGITQNFSYAARSAANAVGAARRRVCALWNRRGGRRLPSPPGSPTRLNLRNLSPEQQERVDRDRRIRSGQSSPRTDKSFPDFSNVPNFSHNNNTAPTVESSQILQDLVSQEQMPQALSDSVSVQRRAHEPKNVGTRKHPGMPPVKQPARRSPPRSAQRSAQRSTQDTAQKPLRRQGSPGIRKQKHITRAERAENRERSAAFRALFVGDIAGMKKAMEAQAARDRQASAAGRRPVELNLMRSSYELDRAQDLNMLANVQSRSFTAVDQLGATEKVLSSSITVAPKTILKIRGRPSISGNRTRSRRATPRRVRFREPVVAEFIDDTRDWGEVEDNLAPHLGDTLDVNERTTETSVGTKAEYTEKENVPPALENEEENEPIVDPWSQPTFEFPLGRAVSAVSLFYPEPKPIPEGRTESVYADRWRQIQEEERQKALPSHGRVSGGKTVATTLSGDPLTKRSLATCYTRGEWLNDEVINGYLALIVDYLRRKNHNAGRNDKPRFHAFNSFFFSNLRDKGYESVARWAKRAKIGGSLLLDVDTVYIPVHNSQHWTLVVVRPGERSIEHFDSLGARSRRHIAVVQTWLRGELGPKYVEEEWRVLPSLSPQQDNGSDCGVFLLTTAKAVAIGLEPLSYGAQDTPLLRRKIVAELMAGGLEGEFDPAQQDHVLL

SEQ ID NO: 77 - DNA, 2664 bp, Aspergillus niger
acttgctcgaagcgctctttgtgtagtttgctcaatgcgttgtgctcctctcggagaaaggcgaggcagcgattcagtgggtagctaatgcgcagttcgttgtggtcaagctggtactgtccgttcgccttttcatcgactaaggacttctccatatgctggattgcttcgatgaggttctgtgcctcatcctccatatcttttttctcactacaaaagattagccctaggtcataaggacattggaatgtaggcgaggcgcatacttatccacaagtttgaggtggttgttcagcgtttcagacaacgcgctgaagagctgctttacagttagtcgcgaggggtgctgagcatatcagaaacaaccaacctctgcttctctggactcgcgctcatggttcggaacgccaatgtcatcaaagattccatgcaattgagtgacgatgttattgacctgagtggtcaagtagcttgtatcgacggccatagtgttgtgtttgtttcccacgcccaagccagggggggttattggtgtattgtggagctgattggcctgaaggaggttgtttgagtgcgcgatcgaagacaaactcgcctttaaatggcgggggtcagcgtcatgtacgctcggggggcggcgatgcgcctggagagattagaaagaggagctgcgagttatccaaacaggcaggatgaacaacgcgagactgcgattgacagcgaagcgcctcacgggaagatgagtggcatctgcgaggacaagggaagacccgccagatttatgaccagctcagcgagatgcgggtatatgcaagggtgactgggatggaggggatggagacaggcagcggtgatggagggaaagacaataacaatatccctttggggattctgcagccgcaatcccgatctgctcgccgccttgttgctctgtttgctgccgctttcagctgtgaccccgtcggcccggtaaccgctgactcagcgccgatctccgccgcgatctgccgggaagttgctcaccgcccggagtcacctcactccatctctctatctactatccagatctcattatctactgctccgcttgaccttttcattccaataatcaaaatctacttctgatttcagccaatccgtgttaatcacttatcccattcccttgctattccaattacatcttctactctaccatccaccatgcaggctgcccagcagtcctggggtacgtccatccccaaccccatccccacccccactccatctcacagcactctaaccccataaccacagaattcgaaaatgccgtcaccctcatagacccccaccgagacgcgctctacaaatacgatgaagagacacacaaagctcttagcgctcagcgcccttggtccaaagacccacactacttcaaatcgatccgaatctccgccgtcgcactcctcaagatggtaatgcacgcgcggtccggcggctccctcgaagtaatgggcctaatgcaaggctatgtcctgcccgaaaccttcgtggtaaccgacgccttccgacttcccgtagagggaaccgaaacgcgagtcaacgcccaagacgaagccaacgaatacatggtctcatacctacagtcgtgccgggatgcaggacggatggaaaatgcagtgggctggtaccacagtcatcccgggtacgggtgctggttatcgggcattgatgtgacgacgcaggatatgcagcagctcgggggaccgtttgtggcggtggtggttgatccagagaggacgatctcagcagggaaggtggatattggggcatttaggacgtttccgaaggattatacgccgccgaaaggggaggggggtagtggtgctggggaggatgactatcagacggtgccgttgaacaaggcggaggactttggggcacatgcgtcacattattattcgctggaggtgtcggtgtttaagagtgcgttggatacggagattctgtcgttgctgtggaataagtattgggttgcgacgttgagtcagagtccgttgtttacgacgagggattatgggagtaagcagatggtggatttgagtcagaagattaagcgggccacgaggggcgtggagagtagtgcttcgcgagggaatctggcgcaagttaaggatccgcagttggagagggtggcgagggatgggcagcggattgtctcggaagaagtgaagggtttgttggcggcggaagtgaagatgaagctgtttcaaaatgttggggaggggaatagatcggagaaatcatgagcttgtgctcaacttctgttcttatgaaaggcttatgaaggttcatttgagaacaactctactatgaatgacgagatgacttaatggatacatttgctgcttctttctttttgttgtctactcagtagcaatttgtgctatcattgtatttggtcgtattacgtctcgttaccgctattcctgtgcactgatgaccattgatgcatgtaatatgtgctttaatatgtactaacacactgcagcaggtgtatatgtccataggagaacagatcagcacaaggggacgacaagaggggtaatcatgaatgaaaatgcccaaagcaaagaccaatccgtcaatagtagcctgcgtcgtgataaatcatcatccgaaccgtaa

SEQ ID NO: 78 - DNA, 1080 bp, Aspergillus niger
  CDS (1)..(1080)
atgcaggctgcccagcagtcctgggaattcgaaaatgccgtcaccctcatagacccccaccgagacgcgctctacaaatacgatgaagagacacacaaagctcttagcgctcagcgcccttggtccaaagacccacactacttcaaatcgatccgaatctccgccgtcgcactcctcaagatggtaatgcacgcgcggtccggcggctccctcgaagtaatgggcctaatgcaaggctatgtcctgcccgaaaccttcgtggtaaccgacgccttccgacttcccgtagagggaaccgaaacgcgagtcaacgcccaagacgaagccaacgaatacatggtctcatacctacagtcgtgccgggatgcaggacggatggaaaatgcagtgggctggtaccacagtcatcccgggtacgggtgctggttatcgggcattgatgtgacgacgcaggatatgcagcagctcgggggaccgtttgtggcggtggtggttgatccagagaggacgatctcagcagggaaggtggatattggggcatttaggacgtttccgaaggattatacgccgccgaaaggggaggggggtagtggtgctggggaggatgactatcagacggtgccgttgaacaaggcggaggactttggggcacatgcgtcacattattattcgctggaggtgtcggtgtttaagagtgcgttggatacggagattctgtcgttgctgtggaataagtattgggttgcgacgttgagtcagagtccgttgtttacgacgagggattatgggagtaagcagatggtggatttgagtcagaagattaagcgggccacgaggggcgtggagagtagtgcttcgcgagggaatctggcgcaagttaaggatccgcagttggagagggtggcgagggatgggcagcggattgtctcggaagaagtgaaggcaggtgtatatgtccataggagaacagatcagcacaaggggacgacaagaggggtaatcatgaatgaaaatgcccaaagcaaagaccaatccgtcaatagtagcctgcgtcgtgataaatcatcatccgaaccgtaa

SEQ ID NO: 79 - protein, 359 aa, Aspergillus niger
MQAAQQSWEFENAVTLIDPHRDALYKYDEETHKALSAQRPWSKDPHYFKSIRISAVALLKMVMHARSGGSLEVMGLMQGYVLPETFVVTDAFRLPVEGTETRVNAQDEANEYMVSYLQSCRDAGRMENAVGWYHSHPGYGCWLSGIDVTTQDMQQLGGPFVAVVVDPERTISAGKVDIGAFRTFPKDYTPPKGEGGSGAGEDDYQTVPLNKAEDFGAHASHYYSLEVSVFKSALDTEILSLLWNKYWVATLSQSPLFTTRDYGSKQMVDLSQKIKRATRGVESSASRGNLAQVKDPQLERVARDGQRIVSEEVKAGVYVHRRTDQHKGTTRGVIMNENAQSKDQSVNSSLRRDKSSSEP

SEQ ID NO: 80 - DNA, 2678 bp, Aspergillus niger
aatacttgtcccagtccgacatcccgggccagggttgcttcgtccttcaacttaagatcgtctaattcgggtgtcaccccgggaggagggtcgttatgctgcttctccatggtggtttgattgcgtgagggaagccacggcatgatggcacggaactgttttactgtttatactgctacaggtaagtacagatgaggtccatcggttataagataaccagttaactttaaccaagagcacccacggaatcaagcgcacaacttccgcgatcagcgactgatacacagtaccttcaccgggtaatttgacgagccgataccgctatgatgccctgtctgtactcatcgcgatgaaggcgaggtcgggagcttgggcgtgagtcaaatgccgggcattgacttttcctatctagaaggcaactatacccgtgggaaggacgacccaatgagattcgtgaagccatgttggtctcgaaacaggaatacgagatctgtgcggtcactcgggcaggttcagaatccggggtcgcgatatggcagcagatcaagggaagccgtcggcagatgcgccaatacgaagcgtcggtcggcaagatgacaaccaggttatcgttcatcgcaatgccggcagctgaaccggcaactctccaccacgcttatccttgggtttccactggttcgagaagtcaatgctgggtccatcttccgggaaactctcaactgcgcctcccccacagattcgatcgtgcggagaaacgcctcgtgttggtcagggacgagggactcatttaatacttgatccactgttatctgccgagctagtcaccctgataatacctgatagtgtttgatagcttgatagcggaggtattattaatggcttatgcgctggatttcccgcggctgtcggggcggatttgataacgacaatcttccgcgatgcggggtgcagatggagtcaccgttgtaactgacactggttcgtaatgatggttacccgagtgatcctatcatggctttcatctgaatgtccgggatttgccccattgcgtcggccgaggttctccacgcttatcccttgccgcgatagcagggcgatgatggggaggggagggcatatatgacgccccggtagacaacgtcgggagctcttacttgattttcagccagcagagaacaagattggcagaccatcgccacaatgaccgcaacgcagaccattacccaaaccgtgccaacgatcgacgaggtcaaggtagcagttgatgcagcgttggagtctgcgcaaacatcgctacgggagctcaaccgagaggtaggcacctaaccctcctttcgcttcatatgatactgatcatcgactttaccacagatctggtgtaatccagaaacagcctaccaagagcatcgagcccatgacaccatctgcgacttcctcgagaagcaaggcttcaccgtaacccgtcacgcatacggactggacacctcttttgaggcaatcagcggatctggtggacgacttatcaacttcaatgccgaatacgatgcgctacctgacatcggtcacgcctgtggccataatctcatcactaccagcagtgtggctgccttcctagcgctgtccacggtcctgaaacaatacggtatccccggtcgcactcaacttctgggcaccccggcagaggagaatggcggtggcaaggccaaactgattgacttgggtgcatacaagggtgtagatgtgtcattgatggcgtacgtattgcctagccctttatgtggcttatcatcttcgagagttgacttttcctattcgcatactgaccttcctcagtcacgcaggacctaaagaactattccctggcgttgtaacagacagcgttggtggtgtgcgaatgaacgcccgaaaagagttacactgcgagttcacaggtcggagtgcccatgctggcggcaatccttgggaaggaatcaatgccctcgacgccctagtaacatcatacaacaacgtggccgtactgcgccagcagctccgcccagatgagcgcatacactgtgctttcttggatacacccacggtggccaacattattccctcgtacaccaaagcgtactggcaggttcgcagcccgacattgaaggggttgaaccaactcatggtcaaagtgcggaactgcattgaggcaggtgcattggctacaggttgtgaggtgaagattatcgagtaaggctgttgatccctggaccaacagaaggtgagctaactggaccaggaacgagctgtataccgacatcaagatcaatgacacactgtgcgaccgttataaagaacacatgtccaagtacgaccgaaatgttatcgcgcgtcttgagcaggtcatgacaggatcatcggatatcggtaggtgcccttgcttgtgcaatcacagtactttgctgatttctccaggcaatgtcagctacattgtcccgacactacacaccatgttcggtatcacggatgaaccaggctccttccctcatcaccccaaatttgctgcagctgctggaaccgattacgcgcatcaagaagcggtgattgtaggcaagtcgctggcgctgattgggtgggagatggtgacgagcgatgagttgtttgggattgcgcagaagcagttgaaggaatgtcttgaggagtag

SEQ ID NO: 81 - DNA, 1227 bp, Aspergillus niger
  CDS (1)..(1227)
atgaccgcaacgcagaccattacccaaaccgtgccaacgatcgacgaggtcaaggtagcagttgatgcagcgttggagtctgcgcaaacatcgctacgggagctcaaccgagagatctggtgtaatccagaaacagcctaccaagagcatcgagcccatgacaccatctgcgacttcctcgagaagcaaggcttcaccgtaacccgtcacgcatacggactggacacctcttttgaggcaatcagcggatctggtggacgacttatcaacttcaatgccgaatacgatgcgctacctgacatcggtcacgcctgtggccataatctcatcactaccagcagtgtggctgccttcctagcgctgtccacggtcctgaaacaatacggtatccccggtcgcactcaacttctgggcaccccggcagaggagaatggcggtggcaaggccaaactgattgacttgggtgcatacaagggtgtagatgtgtcattgatggcgtacgtattgcctagccctttatacagcgttggtggtgtgcgaatgaacgcccgaaaagagttacactgcgagttcacaggtcggagtgcccatgctggcggcaatccttgggaaggaatcaatgccctcgacgccctagtaacatcatacaacaacgtggccgtactgcgccagcagctccgcccagatgagcgcatacactgtgctttcttggatacacccacggtggccaacattattccctcgtacaccaaagcgtactggcaggttcgcagcccgacattgaaggggttgaaccaactcatggtcaaagtgcggaactgcattgaggcaggtgcattggctacaggttgtgaggtgaagattatcgagaacgagctgtataccgacatcaagatcaatgacacactgtgcgaccgttataaagaacacatgtccaagtacgaccgaaatgttatcgcgcgtcttgagcaggtcatgacaggatcatcggatatcggcaatgtcagctacattgtcccgacactacacaccatgttcggtatcacggatgaaccaggctccttccctcatcaccccaaatttgctgcagctgctggaaccgattacgcgcatcaagaagcggtgattgtaggcaagtcgctggcgctgattgggtgggagatggtgacgagcgatgagttgtttgggattgcgcagaagcagttgaaggaatgtcttgaggagtag

SEQ ID NO: 82 - protein, 408 aa, Aspergillus niger
MTATQTITQTVPTIDEVKVAVDAALESAQTSLRELNREIWCNPETAYQEHRAHDTICDFLEKQGFTVTRHAYGLDTSFEAISGSGGRLINFNAEYDALPDIGHACGHNLITTSSVAAFLALSTVLKQYGIPGRTQLLGTPAEENGGGKAKLIDLGAYKGVDVSLMAYVLPSPLYSVGGVRMNARKELHCEFTGRSAHAGGNPWEGINALDALVTSYNNVAVLRQQLRPDERIHCAFLDTPTVANIIPSYTKAYWQVRSPTLKGLNQLMVKVRNCIEAGALATGCEVKIIENELYTDIKINDTLCDRYKEHMSKYDRNVIARLEQVMTGSSDIGNVSYIVPTLHTMFGITDEPGSFPHHPKFAAAAGTDYAHQEAVIVGKSLALIGWEMVTSDELFGIAQKQLKECLEE

SEQ ID NO: 83 - DNA, 3545 bp, Aspergillus niger
tgtactgacaagcgtagtcctcccgcgcccagccgcaaagcgagccgccgccctggcattcatcaactgtctcagcaatgtgtgccagatctacatgccatacctgtaccccggtaagtccaaagttttcatgatctccagtcatatacaacatgctaatccgtgttgtgatcaatagactccgcctctcctcgttatatcgcggccttcagtgtcaatatcgctttgctcgcgatgacaattgtgattgccaccatccttcgcatttatttgggtagattgaataagcagctcgacgaattagaaggtgttactttcgcgcaggctggtgagaatgaagaaaatggcttgcctggccgggcagtggcggagggtttccggttcttgctatagtgctcggagaactctacaccattagttaaggtttatggccgataccccctgtttcgcactatagtttgttatttgtattacatgcactgcaagaggccacgaggaccccatccatactcaggcaatctctcgcctttttgtccaggttgtcaaatcctgaacacagccacaacgcagcaaacctttggatcgagatagccttttgaattgatagtaaccatgggaaatagttattccctctgccatctcacttaagaatcttatctttactgcagtggccagctcaggcttatagcacggctcaatagcctaccccaatccgaatggtatctttagtacagctaaaaatatttcaaacttagccaactaggacctagtgtataatagctagcctatgcatagaaggtatatcccacccagccttcttctaaaataaatacgggccatgcttacattctcagggacacattgtctagttctaaaattaggtcggagtccgacggaggcactaaaagcgccccactgctcagctgccaaccttatcgaacgctatctttggtatattcaccatatagagccgcatattgctactattataacacgaagtggcaggtaagcagcatcttgtgcttgagggtgcatcagcaggggcagtctataaagtcacttcctgcgctgcctcccaatcgcactgcttgcacttcattaccattcagtctctcttttccagctgcatacttcttcagctgctctatcctcctttggtacctattcctcctttttccttttcagcaagcagggacaagcatgtggtaagtgtacatgctccgaattgtgatagtcttgcatcaccactgacaaatacagtggaattttcggctacgtgaattatctcgtagagaagaaccgcaaggagattctcgacaccctcctcaatggtataacgactacatctactattcttggactctacattactaaccatgaacgtaaagggctttcgcgtctagattatcgtggttacgactcagctgggctcgcaatcgacggtgacaaaaagaaagaagtgttcatctacaaagaagtcgggaaggtcgcaggcctgaggaagcttattaccgaggagaagcccgatcccactaagaccttcgaatctcacgctggtattgcacacactcgttgggcgactcacggagtaccatcgcgaaccaactgtcatccccataggtatgcaatcagctttgggagcccccactctaaggccgcgtaattgattcctttatctaggtctgatcctacctcagagtttgttgttgttcacaatggcattacaacaaactacaaagagctgcggagactcctcgcgagcaagggcttcaagttcgaaactgagaccgatactgaagctattgccaagttggctaaatacatctacgatgaaaatccaaccatcgagttcaccacgctcgccaaggctgttatccaggagcttgagggcgcattcggtctgctcataaaatccgttcactaccctcatgaggttatcgccgcccgcaaaggctccccgttagttgttgggatacgatcccagggcaaaatgaaagttgacttcgttgatgtcgaaagtgctcatgaggatatcatgactgccgagacggcatctcaaagcctagcagtgaacaagtctcagggactgagtccaggcggcgctgctcttggcaactcgctcgcacccccagacaagggctttcttcaccactcgcaatcgagggcattcctgtcggacgaaggggtacccatgccagcagagttcttcctatcttccgatccagctgctgtcattgagcacactaagaaggtattgtatctcgaagatgatgatatcgctcacatccacgacggccagctcaacattcaccgtatctcgaaagaccttgggacgtctagtgtccgtgctatccaaacgatcgagctcgaattgcaagaaatgatgaaaggtaacttcgactacttcatgcagaaagagatctacgaacaaccagaatccatcgtcaacgcgatgcgaggtcgtctcaatgccgagaaaaagaccgtgaccctcggcggcttaagacagtacctctcgaccatcagacgctcccgcagaatcatcttcatcgcctgcggcacctcgtaccactcgtgcgtcgcagttcgcgggatcttcgaagaattgaccgagacaccaattgctgttgaactagcttctgatttcctcgacagacaagctcccgtcttccgcgatgatacatgcgtttttgtctctcagtctggtgaaacagccgactccctcatggctctacgatactgtcttagtcgcggtgctctaaccgttggtattgtcaatgttgtcggatcctcaatctccctcttaactcactgcggtgtccacatcaacgctggccctgagatcggcgttgcgtcgaccaaggcctacacttcccaattcgtctgcatggtcatgttcgccttggcacttagtgaagaccgcacaagcaagcgccagcgccgtatagatattatggaggggctagccaacacatctgagcagataaaggaggtactcaagctggatgagaagatcaagaacctatgcatgaaattcaaggaccagaaaagtttgttactcctcggtcgcggtaatcagcatgccactgctcttgaaggtcagtctaacaccccgcccctttctctaataatagcccgaacgctaacaaatcccttttccaggcgccctcaagattaaagaaatctcctacctccactgtgaagccgtcctgtccggcgaactcaagcacggtgttttagctcttgttgacgaggcactacccctcgtcatgattctcacacgcgacgacaacttctccaagtcgctgaatgcctacaaccaggttgttgcgcggaacggtcggcccatcgtcatctgtaatactggtgaccccgagtttcctagcgacaagaccgataggattgaggtccctcgcactgtggatgcgttgcagggtctgttgaacgtgattcctctgcagctcatggcttattggctggctgtcgctgaggggctgaatgttgattttccgaggaatttggctaagtctgttacagttgagtag

SEQ ID NO: 84 - DNA, 2109 bp, Aspergillus niger
  CDS (1)..(2109)
atgtgtggaattttcggctacgtgaattatctcgtagagaagaaccgcaaggagattctcgacaccctcctcaatgggctttcgcgtctagattatcgtggttacgactcagctgggctcgcaatcgacggtgacaaaaagaaagaagtgttcatctacaaagaagtcgggaaggtcgcaggcctgaggaagcttattaccgaggagaagcccgatcccactaagaccttcgaatctcacgctggtattgcacacactcgttgggcgactcacggagtaccatcgcgaaccaactgtcatccccataggtctgatcctacctcagagtttgttgttgttcacaatggcattacaacaaactacaaagagctgcggagactcctcgcgagcaagggcttcaagttcgaaactgagaccgatactgaagctattgccaagttggctaaatacatctacgatgaaaatccaaccatcgagttcaccacgctcgccaaggctgttatccaggagcttgagggcgcattcggtctgctcataaaatccgttcactaccctcatgaggttatcgccgcccgcaaaggctccccgttagttgttgggatacgatcccagggcaaaatgaaagttgacttcgttgatgtcgaaagtgctcatgaggatatcatgactgccgagacggcatctcaaagcctagcagtgaacaagtctcagggactgagtccaggcggcgctgctcttggcaactcgctcgcacccccagacaagggctttcttcaccactcgcaatcgagggcattcctgtcggacgaaggggtacccatgccagcagagttcttcctatcttccgatccagctgctgtcattgagcacactaagaaggtattgtatctcgaagatgatgatatcgctcacatccacgacggccagctcaacattcaccgtatctcgaaagaccttgggacgtctagtgtccgtgctatccaaacgatcgagctcgaattgcaagaaatgatgaaaggtaacttcgactacttcatgcagaaagagatctacgaacaaccagaatccatcgtcaacgcgatgcgaggtcgtctcaatgccgagaaaaagaccgtgaccctcggcggcttaagacagtacctctcgaccatcagacgctcccgcagaatcatcttcatcgcctgcggcacctcgtaccactcgtgcgtcgcagttcgcgggatcttcgaagaattgaccgagacaccaattgctgttgaactagcttctgatttcctcgacagacaagctcccgtcttccgcgatgatacatgcgtttttgtctctcagtctggtgaaacagccgactccctcatggctctacgatactgtcttagtcgcggtgctctaaccgttggtattgtcaatgttgtcggatcctcaatctccctcttaactcactgcggtgtccacatcaacgctggccctgagatcggcgttgcgtcgaccaaggcctacacttcccaattcgtctgcatggtcatgttcgccttggcacttagtgaagaccgcacaagcaagcgccagcgccgtatagatattatggaggggctagccaacacatctgagcagataaaggaggtactcaagctggatgagaagatcaagaacctatgcatgaaattcaaggaccagaaaagtttgttactcctcggtcgcggtaatcagcatgccactgctcttgaaggcgccctcaagattaaagaaatctcctacctccactgtgaagccgtcctgtccggcgaactcaagcacggtgttttagctcttgttgacgaggcactacccctcgtcatgattctcacacgcgacgacaacttctccaagtcgctgaatgcctacaaccaggttgttgcgcggaacggtcggcccatcgtcatctgtaatactggtgaccccgagtttcctagcgacaagaccgataggattgaggtccctcgcactgtggatgcgttgcagggtctgttgaacgtgattcctctgcagctcatggcttattggctggctgtcgctgaggggctgaatgttgattttccgaggaatttggctaagtctgttacagttgagtag

SEQ ID NO: 85 - protein, 702 aa, Aspergillus niger
MCGIFGYVNYLVEKNRKEILDTLLNGLSRLDYRGYDSAGLAIDGDKKKEVFIYKEVGKVAGLRKLITEEKPDPTKTFESHAGIAHTRWATHGVPSRTNCHPHRSDPTSEFVVVHNGITTNYKELRRLLASKGFKFETETDTEAIAKLAKYIYDENPTIEFTTLAKAVIQELEGAFGLLIKSVHYPHEVIAARKGSPLVVGIRSQGKMKVDFVDVESAHEDIMTAETASQSLAVNKSQGLSPGGAALGNSLAPPDKGFLHHSQSRAFLSDEGVPMPAEFFLSSDPAAVIEHTKKVLYLEDDDIAHIHDGQLNIHRISKDLGTSSVRAIQTIELELQEMMKGNFDYFMQKEIYEQPESIVNAMRGRLNAEKKTVTLGGLRQYLSTIRRSRRIIFIACGTSYHSCVAVRGIFEELTETPIAVELASDFLDRQAPVFRDDTCVFVSQSGETADSLMALRYCLSRGALTVGIVNVVGSSISLLTHCGVHINAGPEIGVASTKAYTSQFVCMVMFALALSEDRTSKRQRRIDIMEGLANTSEQIKEVLKLDEKIKNLCMKFKDQKSLLLLGRGNQHATALEGALKIKEISYLHCEAVLSGELKHGVLALVDEALPLVMILTRDDNFSKSLNAYNQVVARNGRPIVICNTGDPEFPSDKTDRIEVPRTVDALQGLLNVIPLQLMAYWLAVAEGLNVDFPRNLAKSVTVE

SEQ ID NO: 86 - DNA, 3214 bp, Aspergillus niger
aaccagtcgagcaacagccgatcgtctccaggccacgcggccctttgggtccagcctcgtccctccgcgtcatcgcccctccaggcgtcaaatcctatcccgatggcgttacttcgtcctccgagctccaagacatgcccactgtctatctcgaacacactaaccatattgatcgcttcaatcgctggcatcataccaataaggaaactcacaatacccgttcggaaagttggtggagtctggtcgaccaagcatatcctccgtgcacccagggttcttctgccagggtctttgataattgcggagactgtgtgcttatcgatagggaatctatccacaatctcccccctaattcacaactgaatgggatagataccttgcatgcaacagattttttttttccgtcgtcacccaccttcaacacagtctgtcctccatgacgtatggagaatgtgaaacttgcaaaaggcgacttcgacgccttattcgtcatccactgacatttgccttgtcaaacatggaacgcaggagaggcaaagttgaaacatcccgctgtgttgcggggcatcgatactccgaacggttgatcggcttacgaagcttgtcccaccaaagttactatagtcaatactatagttgactgcaataaaaggctaaataagggtcctttgggtgctctaacgctggaaaatcccgaccgttaggctacctaatctgctgtctttacccccgttagcccacttacccagctttagtctctcgaaggaaaagaaaacaaagtaatcgggagcctataatattcggccagaagtggggcaatcacttcaaccgttcatctgttattgagttatcaagtctgtcaagttcgtcggagctggataaggtagtcgccatccccatttccgctgtgcaatgccgcagcgccgaagtgtctgcagctagctctattttgttcagctacgtatctgtctcttaaccaaatggatgtcgccattcgcccactaacaacgccattccccacggccgacggactccggcgcaagggcctgataagcgttagctccgactccgagttagtcatgcggcttattacgcgcccttctcccctcacgatgttgatgctttttctggtatctctggcataactggcaaagatcaggctgtggtcataagagtatcattgccttcagcttcttcgccatgttgagtagtctgctgcttgggggtcttctgggtctagcgaccgctcaatttcctcccgagccggaaggcatcactgtgctcaagtccaagttgcatgagaatgtgactatttctttcaaagaggtgtgtgcagagtatctagaaatagcttttatgctcgatgccgtgctgattgtcagcctggaatttgcgaaactacgccgggtgtccgatcttattcgggctatgtacaccttccccccggtttcctttccgacgggacaggagaagtgcaggattatcctatcaacacgtaagccaatctcgaaacattggaggatgagcaattactgagcctcaaccagcttcttttggtttttcgaagcccgcaaagatcccagcaatgcgcctctggccatctggctcaatggcggtccgggtggctcgtcgctcatggggctccttgaagaattaggtccttgttccattgcatcagactccaagaccacagtcctcaatccttggagttggaacaatgaagtcaatcttctattccttgaccagccaactcaagtcggcttctcatacgatgtcccaacaaatggcactttggttcggactgcggacggcgaagaagagatagtttccggtgatttctccattgatgttccccagtccaacttcacccatcatgttggtacctttgcaagccagaagcttgcacagacagctaatgggactgcattcgcggctcacgctctatggcatttcgcgcaaacctggtttttcgagttcccacactacaagccaaacgatgatcgtgtcagtctctgggctgaaagttacggaggccattatggtccaggcatctttcggttcttccaacagcagaatgacaaaatcgcagaggggactgcagaagacggtgcacagtatttgcatctcgacacgcttggcattgtgaacggcttgatggatatggtgatccaagaagaggcttacattacttggccatacaataacgtaaggctcgccccttcttcattcaactcgcgtaatgcctaattcagttcagacctacggcctcgaaatcttcgataaacccctctacgaagaactgatgtataactggacgcatccaggaggctttcgcgatcaggccctcgcctgcgaagcggctttgaaagaacgcgattccggcttgcctcactcagggaagaatatctctgaaatttgcggaggccttgcactagaatggggagatggccccatcacctactaccacaccttcaatcgcgggtggtacgacatcgcccatcctaagaacgacccattccctgccaagcacatgctcggatatttgacgcaggagtccgtccttgccgctcttggggtaccagtcaatttcacatcgtcttcgagtgccgtggctacacagttcataaaaacctttgatatcgtccacggcggcttcctggatgcaattggctacctcctcgacagtggtgtaaaagtacacatgatgtacggagatcgtgattacgcctgcaattgggtcgggggcgaaaaagccagccttgcagttccgtattcccgtatcaccgaatttgccgacacgggatactccccactccttacgcccgacgggatcagcggcatgacccgccagctgggcaactacagcttcactcgcgtcttccaagccgggcatgaggtcccctcctaccagcctgtcgcggcgtatgagatcttcatgcgggcgacattcaacaaagatatccctactggcctcttggctgttgatgacgaattccagtcggttggacctaaggatacgtggcatatcaagaatatccctcctattatgccaaagccgcagtgctatgttctaagtcccggcacgtgtaccccggaggtttgggagaccgttttgaacggatccgcgacggtaaaggattggtatgtcgtggatgatagcgcgggtgttgaggaccacgaggggttcagcattcttggaggggatgagttgtag

SEQ ID NO: 87 - DNA, 1818 bp, Aspergillus niger
  CDS (1)..(1818)
atgttgagtagtctgctgcttgggggtcttctgggtctagcgaccgctcaatttcctcccgagccggaaggcatcactgtgctcaagtccaagttgcatgagaatgtgactatttctttcaaagagcctggaatttgcgaaactacgccgggtgtccgatcttattcgggctatgtacaccttccccccggtttcctttccgacgggacaggagaagtgcaggattatcctatcaacaccttcttttggtttttcgaagcccgcaaagatcccagcaatgcgcctctggccatctggctcaatggcggtccgggtggctcgtcgctcatggggctccttgaagaattaggtccttgttccattgcatcagactccaagaccacagtcctcaatccttggagttggaacaatgaagtcaatcttctattccttgaccagccaactcaagtcggcttctcatacgatgtcccaacaaatggcactttggttcggactgcggacggcgaagaagagatagtttccggtgatttctccattgatgttccccagtccaacttcacccatcatgttggtacctttgcaagccagaagcttgcacagacagctaatgggactgcattcgcggctcacgctctatggcatttcgcgcaaacctggtttttcgagttcccacactacaagccaaacgatgatcgtgtcagtctctgggctgaaagttacggaggccattatggtccaggcatctttcggttcttccaacagcagaatgacaaaatcgcagaggggactgcagaagacggtgcacagtatttgcatctcgacacgcttggcattgtgaacggcttgatggatatggtgatccaagaagaggcttacattacttggccatacaataacgtaaggctcgccccttcttcattcaactcgcgaggctttcgcgatcaggccctcgcctgcgaagcggctttgaaagaacgcgattccggcttgcctcactcagggaagaatatctctgaaatttgcggaggccttgcactagaatggggagatggccccatcacctactaccacaccttcaatcgcgggtggtacgacatcgcccatcctaagaacgacccattccctgccaagcacatgctcggatatttgacgcaggagtccgtccttgccgctcttggggtaccagtcaatttcacatcgtcttcgagtgccgtggctacacagttcataaaaacctttgatatcgtccacggcggcttcctggatgcaattggctacctcctcgacagtggtgtaaaagtacacatgatgtacggagatcgtgattacgcctgcaattgggtcgggggcgaaaaagccagccttgcagttccgtattcccgtatcaccgaatttgccgacacgggatactccccactccttacgcccgacgggatcagcggcatgacccgccagctgggcaactacagcttcactcgcgtcttccaagccgggcatgaggtcccctcctaccagcctgtcgcggcgtatgagatcttcatgcgggcgacattcaacaaagatatccctactggcctcttggctgttgatgacgaattccagtcggttggacctaaggatacgtggcatatcaagaatatccctcctattatgccaaagccgcagtgctatgttctaagtcccggcacgtgtaccccggaggtttgggagaccgttttgaacggatccgcgacggtaaaggattggtatgtcgtggatgatagcgcgggtgttgaggaccacgaggggttcagcattcttggaggggatgagttgtag

SEQ ID NO: 88 - protein, 605 aa, Aspergillus niger
MLSSLLLGGLLGLATAQFPPEPEGITVLKSKLHENVTISFKEPGICETTPGVRSYSGYVHLPPGFLSDGTGEVQDYPINTFFWFFEARKDPSNAPLAIWLNGGPGGSSLMGLLEELGPCSIASDSKTTVLNPWSWNNEVNLLFLDQPTQVGFSYDVPTNGTLVRTADGEEEIVSGDFSIDVPQSNFTHHVGTFASQKLAQTANGTAFAAHALWHFAQTWFFEFPHYKPNDDRVSLWAESYGGHYGPGIFRFFQQQNDKIAEGTAEDGAQYLHLDTLGIVNGLMDMVIQEEAYITWPYNNVRLAPSSFNSRGFRDQALACEAALKERDSGLPHSGKNISEICGGLALEWGDGPITYYHTFNRGWYDIAHPKNDPFPAKHMLGYLTQESVLAALGVPVNFTSSSSAVATQFIKTFDIVHGGFLDAIGYLLDSGVKVHMMYGDRDYACNWVGGEKASLAVPYSRITEFADTGYSPLLTPDGISGMTRQLGNYSFTRVFQAGHEVPSYQPVAAYEIFMRATFNKDIPTGLLAVDDEFQSVGPKDTWHIKNIPPIMPKPQCYVLSPGTCTPEVWETVLNGSATVKDWYVVDDSAGVEDHEGFSILGGDEL

SEQ ID NO: 89 - DNA, 4551 bp, Aspergillus niger
taacgtgtcggtcggagatctttctcggtcatagattgtgacagatctataatcaagatgagatgacggattataccccgttgtaaaggagtcgtatctctgaggagcctgcaagcgcgaagacatggaactcagctcgaaccgttatcaaaactgagactaactcggcttgaaagtacaccctaccttttccttttcccagcctcgagaagcccttcaactgtagagctgattgtaccgtcggcaccttcaactaaggtttcccatgttctcgagacctcccattctgcgcctccacggtgctttctcctcttggagcgggatgcggacgtagtctctccgcgagaccctggtagaagattgttttcatcctcatcctcagagatttctcctatgtactcttcatcggaatcgaccatgcttgcactaaaaggaagcgagtgcgtcaacccaagagtgcgtcgggtgtcatgaaagttagaatggaaaggtctatctaggcatgtatccacattgttggattcggttccagcagggagggtccgagctccgccggagctccgttccctaccttcgattcctcatgaaccaaaggcctatctagcagttgctattctcttcccttttctctttatttccttatcaattcatcctcgcattccttactactatctcacttctctcaattctataatactaaccttcctgtctaggtctttttttttttttttttttttttttggatacctacccttttatctactctgagctcccttgtggtcaaagaaagtctgcttcgtaacctgaagattaatcagctacacttcgtattgctacgacggtgtactacaataactaatgagctgctccgagagtaaccgtaggtaggcagacttggctccgtcctaaaaaatgtggggaagaagatgcatcgcgtcaacccgacgtggtggtatgaatgctcatgcagtccgtggtcaatctccaatttatcgtccggtccgaccagcttcccacctctgcccctcctcctcctcctcctccaccagcacttctttctgcccctccttcatctcttcgtcacgctcccgctccctttccggattgccctactcgacatacctacagtctacccgtagggtcaaacctgctgtattgtcacccgtttctgtaaggcactgttcatctgaaatccgcgcaatggcatctaaggacagagatatcctcccggacgtgtaagttaccgatcgccaacagctgagtatcgtgcacccatctgttggtgtttctctaacaatcgctggcagggtcaagcctgttcattacaatgtgtctttgtttgaccttcagttcggtggctcatggggttataagggtaccgtcaaaatcgattccaaggtcaaccgtcccacaaaagagatcgtgttgaactcgaaggaaatcgaagtccaggatgccgaagtttttggaaatgacggttagtgacagagccacactccaatttctcctgatccatttgtaatccatgatcgaatgttgagtttgacaaattggttgcacttagggaccaagctggcaaaggcatctaatatcgcttacgacaccaaatcggaaagagtcacctttacctttgcagaagaaatactccccgcagatgttgtcctgtcaatcaatttcaccggtataatgaacaatgccatggctggattttcccgctccaagtacaagccggtggtggatccgaccgacgatactcccaaggacggagattcctattacatgcttagtacccaattcgaatcttgtgatgctcgtagggccttcccttgctttgatgaaccgaatttgaaggccacattcgacttcgagatcgaggttccccgaggtcaaacagcccttagcaacatgcctatcaagtctgagaggagcggcagcaggccagagctcaagttggtctcttttgaaactacacctgttatgagtacttacgtcagtatgcacgattacttgcttatgatcctcggcgctaactttggagatcctccgttcagcttctggcatgggcagtcggtgactttgaatatgttgaggcaatgactcaacgcaaataccaaggcaagagcatacctgttcgcgtgtatacgaccaagggcctcaaggagcaggctcgctttgctttggaatgtgcccatcgtacagtcgattacttctctgaaatctttgagatcgagtatccgttgcctaaggcggatctccttgctgtccatgaatttgtacggaaattgatcctgttgcacacgaagcgaatatgctaaccgcaaataatctaggctatgggtgccatggagaactgggggcttgttacctaccgaacgactgctgttcttttcgatgagggcaagtcagacaccagatacaagaatcgtattgcatatgtcgtcgcgcatggtttgtcgtcccttccaatctgagcggccttgttccttcttaacgggtgtaatctagaattggcgcaccaatggtttggaaacctcgtaacgatggattggtggaatgagttgtggctcaatgagggctttgcaacatgggttggctggcttgctgtggatcatttctatccaggtatccgatggccccaggcgcttacagaaccagaaaagctgacgattttcttgcaaatagaatggaacatctggtctcagtttgtcgtacgcaattctcgaggtaaatgcagtcctgtgtggcagaatattgacttttgcataggctgagagtgtccaacaagcatttcaactcgattcactgcgagcttcccacccgatcgaggtgcccgtgaggaacgctctcgaagtcgatcaaatttttgatcatatcagctacctcaaaggaagctcggtcattcggatgctaagtgatcatcttggccgggaaacattcctgcgtggagtagccgcatatctcaaagctcatgcatatggcaagtacacatcgaagacgtatagggaatcgggcttgctaattactgacaacttcaggtaatgccaccactaatgatctttggagcgctctcagcaaagcgtctaatcaggatgttactagctttatggtgagttatctcgttgtacagactggactactattctgacttcattacgaaggatccctggattcgcaagattggcttccctgttgtcaccgtaaccgagcaagccggccaactcagtgttcgtcaaagccgcttcttgtcgacgggtgatgttaagcccgaggaagatgagacggcctggtggattccccttggtgtaaaatcaggacctaagatggccgacgtaaaacccggtgctcttgtttccaaggaagatacaatttgggggctcggacaagattcctattacaagctgaacaaagacctgtctggcttttaccgaaccaattaccctgctgatcggctggcgaaactcgctcagtctctggaactgctgagcaccgaggataagattggattgattggcgatgccgctgccctagctgtttctggcgacggatccactgctgctctattggctctcttagagggtttcaagggcgagaagaattatttgtgagtaactaattatgatgtccttcattcgttctcgggtttcaacaatccttatgcttcatggttggttcttaacgacttgcatagggtctggtcccaaatctcttccactattgcgaacttacgctctgtgttcgccctgaatgagtcggtagcagcaggactcaagaagtttgccctcgagctttcatcccctgctgctaacaaaatcggctgggaatttagctcggaggatgactatctcactatccagctccgtaagcttctaatcggaatggctggccgtgcgggccacaacgagtgggtctattaggagatgttgtacgcttttcttgcaaatctaactttttgctagcataatatccgaggccgaacgacgatttgagctttggaaatcaggcagcgataaggatgctgtgcataccaacctccgctcagtgatctttagtatcgtgatttcagagggcggtcgtgaagaatacaatgctgtaaagcaagagtatctcaagaccgactccgttgacggcaaggagatttgcttaggagctcttggacgtactaaagatgctgagctggtaaaggattacttagattttgttttctcagacaaggttgccatccaggatattcacaatggcgcggcttcaatggctacgaatccctcgactcgccaccttctatgggattatatgaaagagaattgggcggccgttgaaactcgcttgtcagcgaacaatgtcgttttcgagcggtttgtgcgtatgggactgtccaaattcgcgaaccacgatatcgcagccgatattgcttcgtttttccgggagaaggacactggtgcgtacgatcgcgccctggtaatcgttgctgatagcatccgaacgaatgcacgctacaaggaaagagatgagaagcaggtcttagagtggcttcggggccatggctacgcttga

SEQ ID NO: 90 - DNA, 2649 bp, Aspergillus niger
  CDS (1)..(2649)
atggcatctaaggacagagatatcctcccggacgtggtcaagcctgttcattacaatgtgtctttgtttgaccttcagttcggtggctcatggggttataagggtaccgtcaaaatcgattccaaggtcaaccgtcccacaaaagagatcgtgttgaactcgaaggaaatcgaagtccaggatgccgaagtttttggaaatgacgggaccaagctggcaaaggcatctaatatcgcttacgacaccaaatcggaaagagtcacctttacctttgcagaagaaatactccccgcagatgttgtcctgtcaatcaatttcaccggtataatgaacaatgccatggctggattttcccgctccaagtacaagccggtggtggatccgaccgacgatactcccaaggacggagattcctattacatgcttagtacccaattcgaatcttgtgatgctcgtagggccttcccttgctttgatgaaccgaatttgaaggccacattcgacttcgagatcgaggttccccgaggtcaaacagcccttagcaacatgcctatcaagtctgagaggagcggcagcaggccagagctcaagttggtctcttttgaaactacacctgttatgagtacttaccttctggcatgggcagtcggtgactttgaatatgttgaggcaatgactcaacgcaaataccaaggcaagagcatacctgttcgcgtgtatacgaccaagggcctcaaggagcaggctcgctttgctttggaatgtgcccatcgtacagtcgattacttctctgaaatctttgagatcgagtatccgttgcctaaggcggatctccttgctgtccatgaatttgctatgggtgccatggagaactgggggcttgttacctaccgaacgactgctgttcttttcgatgagggcaagtcagacaccagatacaagaatcgtattgcatatgtcgtcgcgcatgaattggcgcaccaatggtttggaaacctcgtaacgatggattggtggaatgagttgtggctcaatgagggctttgcaacatgggttggctggcttgctgtggatcatttctatccagaatggaacatctggtctcagtttgtcgctgagagtgtccaacaagcatttcaactcgattcactgcgagcttcccacccgatcgaggtgcccgtgaggaacgctctcgaagtcgatcaaatttttgatcatatcagctacctcaaaggaagctcggtcattcggatgctaagtgatcatcttggccgggaaacattcctgcgtggagtagccgcatatctcaaagctcatgcatatggcaataatgccaccactaatgatctttggagcgctctcagcaaagcgtctaatcaggatgttactagctttatggatccctggattcgcaagattggcttccctgttgtcaccgtaaccgagcaagccggccaactcagtgttcgtcaaagccgcttcttgtcgacgggtgatgttaagcccgaggaagatgagacggcctggtggattccccttggtgtaaaatcaggacctaagatggccgacgtaaaacccggtgctcttgtttccaaggaagatacaatttgggggctcggacaagattcctattacaagctgaacaaagacctgtctggcttttaccgaaccaattaccctgctgatcggctggcgaaactcgctcagtctctggaactgctgagcaccgaggataagattggattgattggcgatgccgctgccctagctgtttctggcgacggatccactgctgctctattggctctcttagagggtttcaagggcgagaagaattatttggtctggtcccaaatctcttccactattgcgaacttacgctctgtgttcgccctgaatgagtcggtagcagcaggactcaagaagtttgccctcgagctttcatcccctgctgctaacaaaatcggctgggaatttagctcggaggatgactatctcactatccagctccgtaagcttctaatcggaatggctggccgtgcgggccacaacgacataatatccgaggccgaacgacgatttgagctttggaaatcaggcagcgataaggatgctgtgcataccaacctccgctcagtgatctttagtatcgtgatttcagagggcggtcgtgaagaatacaatgctgtaaagcaagagtatctcaagaccgactccgttgacggcaaggagatttgcttaggagctcttggacgtactaaagatgctgagctggtaaaggattacttagattttgttttctcagacaaggttgccatccaggatattcacaatggcgcggcttcaatggctacgaatccctcgactcgccaccttctatgggattatatgaaagagaattgggcggccgttgaaactcgcttgtcagcgaacaatgtcgttttcgagcggtttgtgcgtatgggactgtccaaattcgcgaaccacgatatcgcagccgatattgcttcgtttttccgggagaaggacactggtgcgtacgatcgcgccctggtaatcgttgctgatagcatccgaacgaatgcacgctacaaggaaagagatgagaagcaggtcttagagtggcttcggggccatggctacgcttga

SEQ ID NO: 91 - protein, 882 aa, Aspergillus niger
MASKDRDILPDVVKPVHYNVSLFDLQFGGSWGYKGTVKIDSKVNRPTKEIVLNSKEIEVQDAEVFGNDGTKLAKASNIAYDTKSERVTFTFAEEILPADVVLSINFTGIMNNAMAGFSRSKYKPVVDPTDDTPKDGDSYYMLSTQFESCDARRAFPCFDEPNLKATFDFEIEVPRGQTALSNMPIKSERSGSRPELKLVSFETTPVMSTYLLAWAVGDFEYVEAMTQRKYQGKSIPVRVYTTKGLKEQARFALECAHRTVDYFSEIFEIEYPLPKADLLAVHEFAMGAMENWGLVTYRTTAVLFDEGKSDTRYKNRIAYVVAHELAHQWFGNLVTMDWWNELWLNEGFATWVGWLAVDHFYPEWNIWSQFVAESVQQAFQLDSLRASHPIEVPVRNALEVDQIFDHISYLKGSSVIRMLSDHLGRETFLRGVAAYLKAHAYGNNATTNDLWSALSKASNQDVTSFMDPWIRKIGFPVVTVTEQAGQLSVRQSRFLSTGDVKPEEDETAWWIPLGVKSGPKMADVKPGALVSKEDTIWGLGQDSYYKLNKDLSGFYRTNYPADRLAKLAQSLELLSTEDKIGLIGDAAALAVSGDGSTAALLALLEGFKGEKNYLVWSQISSTIANLRSVFALNESVAAGLKKFALELSSPAANKIGWEFSSEDDYLTIQLRKLLIGMAGRAGHNDIISEAERRFELWKSGSDKDAVHTNLRSVIFSIVISEGGREEYNAVKQEYLKTDSVDGKEICLGALGRTKDAELVKDYLDFVFSDKVAIQDIHNGAASMATNPSTRHLLWDYMKENWAAVETRLSANNVVFERFVRMGLSKFANHDIAADIASFFREKDTGAYDRALVIVADSIRTNARYKERDEKQVLEWLRGHGYA

SEQ ID NO: 92 - DNA, 4339 bp, Aspergillus niger
ttgcccattatgtctgtgccgaccatgcagcgtgaaacggccttccaggtccggtctctggtatgcccaccctgctgaaactagattgcgcgaaatccctcctacccttgtatcgcagtggcattggggctaaccagtctatctcatgcggacagttccgctctttgctccgtcaatcctcccagttctcgaactacaacttccgcgagtatgcccgccggcgcacgttggatgccttccgcgagcaccagaaggaatccgaggaccgacggatacaggagttgatccaggatggactacagaacttgcggatgatgaaggtcagtaaatattctcggatggacatgattagatgtgcccacgtttgcctctactacgcaggctgtgggctctgagtcaaagcgggggttgacgctagtgaacgagctgctaatacttttgcagaggcaaaccgttatcagtcagttctaccagctagatcggttggttgttgagggtcagaagactgtgagtatccggggaacctgtctgtgactgccatgaagctaaaatcaatcgatagggtaagcagactggcacggaagggaacattgttcgccagaaggatactgggtaagatgcacccttcgttatttgaattttttgggccatgctgacgtgtaaatagttgggactaaacgcccaacggggttcatttgtttttttcgcagcgagagtacggagttgaggggaatccagcaccaagacgatatcaatatcatttggggccatttgagccgatggcccgaagatgaaggaatagcatagatcgaaggggttctgtatttttattgaaagccactgcgctttaggtagcgattcttactctgactcatctggaatactattcttcgctctccattagtccaatccatcccatctgaaaccgtagtgggtggtagttatcatgtttgttcgatactatgagagttctgagtgaccccagtcacgtgcaagggcggcggcgcggcgtttcgctgagcgatcgcatcgcgctgctccgatcaaccatcacctccaaacagcctcgccctccagaaagagtccctttcttttcaatcgggcaaccacacccagctccgtagatccactgggtgaggggctctctgccgttatcctgattattctccgaagagtgagactgcaggtccggcgctcatcatgccacctactgtaagcttctcgccgcgagccacgaccccgaccccgttatcgatcaactcaccattgcaccgaagcttgcccatgcggtatagaacgatgccatcgctgatatgtactgacaatcatccagtttagatcctctcgctctggtcgccaattcggcgatggcgccaaccgtaacagaagtcagatcgatcacgatgttttcgaggggctccctgtacgacgctggacacgtcaaactcagaccgtctcgcaagtccccaaggccgaaggcacagaagctgtcgtgcagggtccgggggggaagtcaaccatcccagaacacccaatgccccgagacagtcacctgttgagtcccatgagcagagccctcctgcgagctgcgcgagccggatgcatctacatccgccaagcgtctaaagactccgaagacgaagagaaagaagcgactgatggagaggaacagccacttatccagagcaccgaacgcagtttcgtcacgcgcaaatggtccgcagtaccgagacacctagaatcatcagaagttgaattcctcgccaaacgacgaccgggtttaccatctctatacggtgctgctgctgggtctacggatggaaataatgcacctgcgccgatgaggaggaccaagttcaagaaggtcgatccggcgaccggaaatatctcgatttatgaagcctgggtaccggagggacacaagattgagggggagatcactgatgggtctcaagtttcagctgaaaacagcgcggtcactgtgactcctgaggcgccagcgcccggtacggtcattgagggagttggggttgtcaacgccgagggtgtggtagtcgcagatacaaactccgcagctgtcatgactcctccgaaaagacggcctcctcccccaaagcgcaaggcgaagggctttggaaagggacggagaaagaaggtcatgtttgctcctggcgatggcgcggatgccgccacggtccatggttccaatggctccggagtggatggcgctgcagaatatgccaaggacggggatgcgtcccgcatgtctggtgaccagaatggacaagaagaggacgatgaggagggcgaggagggcgatgagagcgacgagggtgatgagtctatgctagaggccaagactccggaaactccagttcagcgtcccagcactgagccgcccaccgactcgacgcctgtgcccgcaccggccccggcaactgaaccagctgccaaagctgattccacagaggcggcgttgccaacccctgagcttccttcagctgctccagaaccggctccagcaccggctccagagacagttgcagagccagctgccccactccctcagccagatcaaccatcagtcgctgctgaacctccttcacaagctgctgctatccagcccacaccagaggctcccgagcagacgagtgaggcatcaggacagaaagaagatgtggagatgaccgaagcttacccctcaatacctggtcctgaggaaagtgtatctgcaacccctcagtcagttccagctactcagcaacaggagcccactcctggcgctgaagatgttccgaccttaccatcccaggaagccccccaacctcccgttgcggaagcatcgtcagtcgtgccaacctcagagcaacctgtcgataaagagcctgtagatgagccagtgcagccagataagacaactactgatactgctcagccgccggcacagagtgaccagattatggatacgaccatggaggatgttgaacctctccaacaaaccgcacaggatcaagcggcggttccaccgccggcggaacaaccgatacccgagcaagcagctcagactagtaatgttgtcgcagagaacaaggaagttgacctcttgggtactttggaagcgagtctgagccagccgccgggcgaggaacagggtgacaaccgagggacagacattgagatggaaatggatgcaccttcccacattgagcagcctgctgctacggaaacagctgagcctcttgcggataagccaggggagcttgagacgcaagcagcagaggatactaccgtggctgcagaaactgccgttgaaccagctgcagtgcccgctgaaccactcgacgaacagcacaccgaaaaaccgtccgaggcacctgcaccgcagcctatcgaacaactccccgaagctccagcagagcaagtggaagagccggcaggcgagccggtcatggagcagccagtgaagtcggaatcacctgctcagccagagcaacctacgcaattagagccacctgttcagccagaacagcctatgcaggaagagcctgtacaggcagttgaacctgtgcagtcagagcagccagagcaacctaagccacctgttcagccggaacagcctgtgcaggcggagcctgtagagccagcggagtctgcgcagccagagcaaccggagcaaccagaagggactcagcaatacgagcagcctgcgcaaccattgcagcaagagcaaccccaagagcaagccccatcacaagcttctgaggaagttccagcccagtctgcagagccgacaccccagactgcaaccgagcagcagcccgagcagaccgaacagacacagaccgagcaggcgcctgctgagctaccgtcagagccacaagcagatgaaccaccaaaagcactagaggagcatgttcccgttaacgcagaggaaccagccgctcccaaggtagaagaacaaggaacacccctcgtcccacctcaacaaccagaggaaccccagccacccaaagaacctacgccgcccgcattacctgctacagaggcaccacagcaacagccagagccagtaccggcgccacagcccccagctgaagaacctcaagctgaagaaaaaccaacccaagaaggtccagctgaggctgaatccaaggagccggagcctatctccgaagccgaacccaccccagccgaagccccctctgcacctcccatctctgcgcctgagcctgagcccgagcccacccccgagcaaccagcccaggagacgaccaaacccgaggaggcagagcagcaggagcaacaacaacaaccaccagctgataccaagacagcatga

SEQ ID NO: 93 - DNA, 3018 bp, Aspergillus niger
  CDS (1)..(3018)
atgccacctacttttagatcctctcgctctggtcgccaattcggcgatggcgccaaccgtaacagaagtcagatcgatcacgatgttttcgaggggctccctgtacgacgctggacacgtcaaactcagaccgtctcgcaagtccccaaggccgaaggcacagaagctgtcgtgcagggtccgggggggaagtcaaccatcccagaacacccaatgccccgagacagtcacctgttgagtcccatgagcagagccctcctgcgagctgcgcgagccggatgcatctacatccgccaagcgtctaaagactccgaagacgaagagaaagaagcgactgatggagaggaacagccacttatccagagcaccgaacgcagtttcgtcacgcgcaaatggtccgcagtaccgagacacctagaatcatcagaagttgaattcctcgccaaacgacgaccgggtttaccatctctatacggtgctgctgctgggtctacggatggaaataatgcacctgcgccgatgaggaggaccaagttcaagaaggtcgatccggcgaccggaaatatctcgatttatgaagcctgggtaccggagggacacaagattgagggggagatcactgatgggtctcaagtttcagctgaaaacagcgcggtcactgtgactcctgaggcgccagcgcccggtacggtcattgagggagttggggttgtcaacgccgagggtgtggtagtcgcagatacaaactccgcagctgtcatgactcctccgaaaagacggcctcctcccccaaagcgcaaggcgaagggctttggaaagggacggagaaagaaggtcatgtttgctcctggcgatggcgcggatgccgccacggtccatggttccaatggctccggagtggatggcgctgcagaatatgccaaggacggggatgcgtcccgcatgtctggtgaccagaatggacaagaagaggacgatgaggagggcgaggagggcgatgagagcgacgagggtgatgagtctatgctagaggccaagactccggaaactccagttcagcgtcccagcactgagccgcccaccgactcgacgcctgtgcccgcaccggccccggcaactgaaccagctgccaaagctgattccacagaggcggcgttgccaacccctgagcttccttcagctgctccagaaccggctccagcaccggctccagagacagttgcagagccagctgccccactccctcagccagatcaaccatcagtcgctgctgaacctccttcacaagctgctgctatccagcccacaccagaggctcccgagcagacgagtgaggcatcaggacagaaagaagatgtggagatgaccgaagcttacccctcaatacctggtcctgaggaaagtgtatctgcaacccctcagtcagttccagctactcagcaacaggagcccactcctggcgctgaagatgttccgaccttaccatcccaggaagccccccaacctcccgttgcggaagcatcgtcagtcgtgccaacctcagagcaacctgtcgataaagagcctgtagatgagccagtgcagccagataagacaactactgatactgctcagccgccggcacagagtgaccagattatggatacgaccatggaggatgttgaacctctccaacaaaccgcacaggatcaagcggcggttccaccgccggcggaacaaccgatacccgagcaagcagctcagactagtaatgttgtcgcagagaacaaggaagttgacctcttgggtactttggaagcgagtctgagccagccgccgggcgaggaacagggtgacaaccgagggacagacattgagatggaaatggatgcaccttcccacattgagcagcctgctgctacggaaacagctgagcctcttgcggataagccaggggagcttgagacgcaagcagcagaggatactaccgtggctgcagaaactgccgttgaaccagctgcagtgcccgctgaaccactcgacgaacagcacaccgaaaaaccgtccgaggcacctgcaccgcagcctatcgaacaactccccgaagctccagcagagcaagtggaagagccggcaggcgagccggtcatggagcagccagtgaagtcggaatcacctgctcagccagagcaacctacgcaattagagccacctgttcagccagaacagcctatgcaggaagagcctgtacaggcagttgaacctgtgcagtcagagcagccagagcaacctaagccacctgttcagccggaacagcctgtgcaggcggagcctgtagagccagcggagtctgcgcagccagagcaaccggagcaaccagaagggactcagcaatacgagcagcctgcgcaaccattgcagcaagagcaaccccaagagcaagccccatcacaagcttctgaggaagttccagcccagtctgcagagccgacaccccagactgcaaccgagcagcagcccgagcagaccgaacagacacagaccgagcaggcgcctgctgagctaccgtcagagccacaagcagatgaaccaccaaaagcactagaggagcatgttcccgttaacgcagaggaaccagccgctcccaaggtagaagaacaaggaacacccctcgtcccacctcaacaaccagaggaaccccagccacccaaagaacctacgccgcccgcattacctgctacagaggcaccacagcaacagccagagccagtaccggcgccacagcccccagctgaagaacctcaagctgaagaaaaaccaacccaagaaggtccagctgaggctgaatccaaggagccggagcctatctccgaagccgaacccaccccagccgaagccccctctgcacctcccatctctgcgcctgagcctgagcccgagcccacccccgagcaaccagcccaggagacgaccaaacccgaggaggcagagcagcaggagcaacaacaacaaccaccagctgataccaagacagcatga

SEQ ID NO: 94 - protein, 1005 aa, Aspergillus niger
MPPTFRSSRSGRQFGDGANRNRSQIDHDVFEGLPVRRWTRQTQTVSQVPKAEGTEAVVQGPGGKSTIPEHPMPRDSHLLSPMSRALLRAARAGCIYIRQASKDSEDEEKEATDGEEQPLIQSTERSFVTRKWSAVPRHLESSEVEFLAKRRPGLPSLYGAAAGSTDGNNAPAPMRRTKFKKVDPATGNISIYEAWVPEGHKIEGEITDGSQVSAENSAVTVTPEAPAPGTVIEGVGVVNAEGVVVADTNSAAVMTPPKRRPPPPKRKAKGFGKGRRKKVMFAPGDGADAATVHGSNGSGVDGAAEYAKDGDASRMSGDQNGQEEDDEEGEEGDESDEGDESMLEAKTPETPVQRPSTEPPTDSTPVPAPAPATEPAAKADSTEAALPTPELPSAAPEPAPAPAPETVAEPAAPLPQPDQPSVAAEPPSQAAAIQPTPEAPEQTSEASGQKEDVEMTEAYPSIPGPEESVSATPQSVPATQQQEPTPGAEDVPTLPSQEAPQPPVAEASSVVPTSEQPVDKEPVDEPVQPDKTTTDTAQPPAQSDQIMDTTMEDVEPLQQTAQDQAAVPPPAEQPIPEQAAQTSNVVAENKEVDLLGTLEASLSQPPGEEQGDNRGTDIEMEMDAPSHIEQPAATETAEPLADKPGELETQAAEDTTVAAETAVEPAAVPAEPLDEQHTEKPSEAPAPQPIEQLPEAPAEQVEEPAGEPVMEQPVKSESPAQPEQPTQLEPPVQPEQPMQEEPVQAVEPVQSEQPEQPKPPVQPEQPVQAEPVEPAESAQPEQPEQPEGTQQYEQPAQPLQQEQPQEQAPSQASEEVPAQSAEPTPQTATEQQPEQTEQTQTEQAPAELPSEPQADEPPKALEEHVPVNAEEPAAPKVEEQGTPLVPPQQPEEPQPPKEPTPPALPATEAPQQQPEPVPAPQPPAEEPQAEEKPTQEGPAEAESKEPEPISEAEPTPAEAPSAPPISAPEPEPEPTPEQPAQETTKPEEAEQQEQQQQPPADTKTA

SEQ ID NO: 95 - DNA, 4556 bp, Aspergillus niger
atggagctggagcgtagcgagaatgtcatcattgtcacgcaccaggctgttctccgctgcatctatgcctacttcctcaacacgccgcaggagcaaagtccttggatggaggtgccgctccacacgctaatcaagctcacgccgcgcgcatacggcactgaggagcagcggttcaaggcagacattcccgccgtctcgacatggcgtgcgaagggcacgtcggccaaacaccaggaataccccacggagatcaaggcatgatctgagaggcattcggacgactattattattatcctgaatagtccgaaacacaatcgacctttccggtcatatagttatcctacctatcggttttgccattctcatattcccggtcgggaatcggcttacccttcacattgtacatgcgccgtgcgttttctccattctttggtcttgatatttgcaaaagtccggattccttgtcgctgcggtccgtcgggctgtgttatgggttttgatcggtcggttgggcagttatggaattgattcattgcatgggatcggagctttaagccagcggatggcacatccatggatgggatagtagcggtgtgtgcaggacatccatccatcggttagcttagcataatagactagatactcaagacaacgttgatgtaatcattaagctacaagacatttcttaataaatgacacgcaagggatgctgtcacaagcaaatacagaatgtagttgtagcacagacagacggggaaacccatcttggcgcggcccgggggagtgtgcagctgtccggtccagctggactcctccgcccgtagtactaggagctccgctatcaacctccgcccaaccaccgcactgcaccgcagcaccacatcactcacctacctacctacatacaacaacttccacaccatgacacccacctacaccttctaactccacctcgaaattaattgcacagtaccatagccacgacatgacatgaacctacccccgatcgcgaacggcgcattacccacttacctcacacctccttcccgagcatccatcctctacgacttaccgagctagctagctagctagccagcacaccgcactataccccaccgataatttgaatatatacacgaacatacaaccgcttattacttttccgaaggaaagatattacgaaggcgaagaagaagaagatgctatccgcattcacagcccgccccctggtggaactcaaaccgcgcgaccgctcacggatcgaatccgtgctggcgtatggggaccgcgtgctggcggggctgaataatgggtcgttgaggatatatcgcgtgaatgagcaggaagaggaaccagaagagggagaagaggggggtgaaggacagcaacatgagcagcatggtcaggatacagggaagggggggaagaaagataccgatcaacaagggaatggcaatggagaggcagggataatcacgaacggaactacgaacggcacccgggagcacaagaaacccacggagctactacgcgaagtggagaagttctcacgatacaagatcgagcagttggcgctgattaaggaagccaaggtgcttgtttctctatctgggggatatgtctcgctgcatgatctagggacgtatgcgttgcaggagcaattggggaagacgaagggggcgacgacgtttgcggtgacgtcgaatatcgagaatgattccgaaacgggagtgcctgctatcgtgtcgagggtggcggtggcggtgaagaggaagataatgctgtgggtgtggcgggatatggagatggaagggggcgtgcctatggagatgacgcttgtcagtgggattaagacgctgacgtgggtgtctgggacgaggttggtggctgggttggggtcggggtttgtgatggttgatattgaggggggtagtggtgggacggtgacggatttgactggtccgtctgggataggggggttagggggacaggagagtacggggaggttggccggggtgggggtcgccagtatgagttatatggggcttgggggcagtgcgccgaagccgttggcgacgaggttgaaggagggccaggtgttgctggctaaggatattaacacgcattttattgatgtgcagggaaattcgctggggaggagacaaattccgtggagtcatgcgccggcggatattgggtactcgtatccgttcttgttggcgctgcatgattcctcgaagggagtgttggaggtacgaaatccggagacgttgtcgctgttgcagtcggttccgttgccatcagcaagtattatgcatatcccgcagccaacgattagtctggcgcatgctgggaaggggttcttggtggcgagtgatcggacgatatggcggatggaggcgctgagttatgatacgcagattgactcgctggtcgagaaggggtatctggacgaagcgatcagtctggccagtatgctggaggatgcgctgctgagggataagcagggccggctgcgccagatcaagctggagaaggctgaagggctgttcaagatgcgaaagtacaccgattcgatggatctgtttacggagatatctgcgcctccggagacggtgatacgactgtatccgaagatcatcgccggggagctgtcgtcgattgttgaggagccggaggagtcagaagatggaacgacagacagccagcccaagacgcaggagaacaacaacccgacggacgcgccggctacggaggaaacgccagcgccgaagacactctcgcatgctccgtctgtgatgtcacttttacggacgcggacagatgacggcagtgatgcgggcagtattcgtggcaaggttgtcgaggaggccaagaacgacaaggcgctggaaggtgccgatctcaagctggctgttcgtgacctgcagagatatctggcagatgtgcggaggcggttccagcgcttcttgaacccggatggcacgctaaaggtgattgatgcgacgacggacggcgcgaacgatgccttaacggactcggtcatgaagctgctgagcattgatccggagggtgagtacgatctcggggagaagctgcgggaaaaggccaggctcgtggacacgactctcttccgagcgtacatgtacgctattccagctctggcaggctcgttgttccgcattgccaacttctgtgatccagatgtggtgatggaaaaattggaggagacggggcgtcacaacgatctgattgactttttgtacggaaagaagctgcaccgacaagcgttggagctgcttcagaagttcggacaggccgacgatgaagaagagacggcgccgcagctgcacgggccgaagcgaacagtcaattatctacagaatctgtctccagaccatattgacttgatcctcgagttcgctgaatggccagtacgacaggatcctgagctgggcatggagatattcctggcagatacggagaacgcggagacgctgccgcgggaacgagtgctagacttcctgcagggcattgatgtcaatctggccgtccgctacctggagcatatcattggggagttgaatgatatgacaccggatctgcatcagaaactgctcatcctgtacttgaaccggctgaagaagcaccaggctaaagagtgggagttctctagtctggatgactatgttaattggcagagcaagttcttgaatatgctcaggtccagctctcagtattctccggctaagattctggatcgattggaccgagacggtgagtaccctccttgcgcttacattgcgttgctgacttgtagaaagatcctgaattcttcgaggcacgagcgattgtcttcagcaagatggggcaacaccggcaggcactggagatttatgtattcaagttggaagactacgtcaaggctgaagagtgagttgcattgatcgatatacatgagttctgctgaccgttcagatactgtaatcatctccataaagtggaggatacgactgctgcggatggatcggtttcgcgctgcgtagctctactaccatacgaagatgacaaaccatcgatttatttgactctattgtctctatatctatctccgccgcatggctacaagccacggtacgggcccgcgcttgaggtgctggccaaacatggatcccggctgccacccaattctgctctggatctgatcccagaatcgctcccggtcaaggagctcgagttctatttcaagggccgtatgcgggccgccaacacaatccttaacgagagccggatcgtggccaaccttcaaaaggcagaagacatcaagacacaggcgcagttattggtaggagagggaacggacgggcgatcgacgcgctcacgacatgtcaccatcaccgaagagcgggtctgcggcatctgccacaagcggatcggaggcagtgtgattaatgtgtttccggagtaagtatggccagattctgttgacttgagcatggctaattgaggcagtaatacggttgtccatcttggctgtgccaatcgcatgcgttga

SEQ ID NO: 96 - DNA, 3216 bp, Aspergillus niger
  CDS (1)..(3216)
atgctatccgcattcacagcccgccccctggtggaactcaaaccgcgcgaccgctcacggatcgaatccgtgctggcgtatggggaccgcgtgctggcggggctgaataatgggtcgttgaggatatatcgcgtgaatgagcaggaagaggaaccagaagagggagaagaggggggtgaaggacagcaacatgagcagcatggtcaggatacagggaagggggggaagaaagataccgatcaacaagggaatggcaatggagaggcagggataatcacgaacggaactacgaacggcacccgggagcacaagaaacccacggagctactacgcgaagtggagaagttctcacgatacaagatcgagcagttggcgctgattaaggaagccaaggtgcttgtttctctatctgggggatatgtctcgctgcatgatctagggacgtatgcgttgcaggagcaattggggaagacgaagggggcgacgacgtttgcggtgacgtcgaatatcgagaatgattccgaaacgggagtgcctgctatcgtgtcgagggtggcggtggcggtgaagaggaagataatgctgtgggtgtggcgggatatggagatggaagggggcgtgcctatggagatgacgcttgtcagtgggattaagacgctgacgtgggtgtctgggacgaggttggtggctgggttggggtcggggtttgtgatggttgatattgaggggggtagtggtgggacggtgacggatttgactggtccgtctgggataggggggttagggggacaggagagtacggggaggttggccggggtgggggtcgccagtatgagttatatggggcttgggggcagtgcgccgaagccgttggcgacgaggttgaaggagggccaggtgttgctggctaaggatattaacacgcattttattgatgtgcagggaaattcgctggggaggagacaaattccgtggagtcatgcgccggcggatattgggtactcgtatccgttcttgttggcgctgcatgattcctcgaagggagtgttggaggtacgaaatccggagacgttgtcgctgttgcagtcggttccgttgccatcagcaagtattatgcatatcccgcagccaacgattagtctggcgcatgctgggaaggggttcttggtggcgagtgatcggacgatatggcggatggaggcgctgagttatgatacgcagattgactcgctggtcgagaaggggtatctggacgaagcgatcagtctggccagtatgctggaggatgcgctgctgagggataagcagggccggctgcgccagatcaagctggagaaggctgaagggctgttcaagatgcgaaagtacaccgattcgatggatctgtttacggagatatctgcgcctccggagacggtgatacgactgtatccgaagatcatcgccggggagctgtcgtcgattgttgaggagccggaggagtcagaagatggaacgacagacagccagcccaagacgcaggagaacaacaacccgacggacgcgccggctacggaggaaacgccagcgccgaagacactctcgcatgctccgtctgtgatgtcacttttacggacgcggacagatgacggcagtgatgcgggcagtattcgtggcaaggttgtcgaggaggccaagaacgacaaggcgctggaaggtgccgatctcaagctggctgttcgtgacctgcagagatatctggcagatgtgcggaggcggttccagcgcttcttgaacccggatggcacgctaaaggtgattgatgcgacgacggacggcgcgaacgatgccttaacggactcggtcatgaagctgctgagcattgatccggagggtgagtacgatctcggggagaagctgcgggaaaaggccaggctcgtggacacgactctcttccgagcgtacatgtacgctattccagctctggcaggctcgttgttccgcattgccaacttctgtgatccagatgtggtgatggaaaaattggaggagacggggcgtcacaacgatctgattgactttttgtacggaaagaagctgcaccgacaagcgttggagctgcttcagaagttcggacaggccgacgatgaagaagagacggcgccgcagctgcacgggccgaagcgaacagtcaattatctacagaatctgtctccagaccatattgacttgatcctcgagttcgctgaatggccagtacgacaggatcctgagctgggcatggagatattcctggcagatacggagaacgcggagacgctgccgcgggaacgagtgctagacttcctgcagggcattgatgtcaatctggccgtccgctacctggagcatatcattggggagttgaatgatatgacaccggatctgcatcagaaactgctcatcctgtacttgaaccggctgaagaagcaccaggctaaagagtgggagttctctagtctggatgactatgttaattggcagagcaagttcttgaatatgctcaggtccagctctcagtattctccggctaagattctggatcgattggaccgagacgatcctgaattcttcgaggcacgagcgattgtcttcagcaagatggggcaacaccggcaggcactggagatttatgtattcaagttggaagactacgtcaaggctgaagaatactgtaatcatctccataaagtggaggatacgactgctgcggatggatcggtttcgcgctgcgtagctctactaccatacgaagatgacaaaccatcgatttatttgactctattgtctctatatctatctccgccgcatggctacaagccacggtacgggcccgcgcttgaggtgctggccaaacatggatcccggctgccacccaattctgctctggatctgatcccagaatcgctcccggtcaaggagctcgagttctatttcaagggccgtatgcgggccgccaacacaatccttaacgagagccggatcgtggccaaccttcaaaaggcagaagacatcaagacacaggcgcagttattggtaggagagggaacggacgggcgatcgacgcgctcacgacatgtcaccatcaccgaagagcgggtctgcggcatctgccacaagcggatcggaggcagtgtgattaatgtgtttccggataatacggttgtccatcttggctgtgccaatcgcatgcgttga

SEQ ID NO: 97 - protein, 1071 aa, Aspergillus niger
MLSAFTARPLVELKPRDRSRIESVLAYGDRVLAGLNNGSLRIYRVNEQEEEPEEGEEGGEGQQHEQHGQDTGKGGKKDTDQQGNGNGEAGIITNGTTNGTREHKKPTELLREVEKFSRYKIEQLALIKEAKVLVSLSGGYVSLHDLGTYALQEQLGKTKGATTFAVTSNIENDSETGVPAIVSRVAVAVKRKIMLWVWRDMEMEGGVPMEMTLVSGIKTLTWVSGTRLVAGLGSGFVMVDIEGGSGGTVTDLTGPSGIGGLGGQESTGRLAGVGVASMSYMGLGGSAPKPLATRLKEGQVLLAKDINTHFIDVQGNSLGRRQIPWSHAPADIGYSYPFLLALHDSSKGVLEVRNPETLSLLQSVPLPSASIMHIPQPTISLAHAGKGFLVASDRTIWRMEALSYDTQIDSLVEKGYLDEAISLASMLEDALLRDKQGRLRQIKLEKAEGLFKMRKYTDSMDLFTEISAPPETVIRLYPKIIAGELSSIVEEPEESEDGTTDSQPKTQENNNPTDAPATEETPAPKTLSHAPSVMSLLRTRTDDGSDAGSIRGKVVEEAKNDKALEGADLKLAVRDLQRYLADVRRRFQRFLNPDGTLKVIDATTDGANDALTDSVMKLLSIDPEGEYDLGEKLREKARLVDTTLFRAYMYAIPALAGSLFRIANFCDPDVVMEKLEETGRHNDLIDFLYGKKLHRQALELLQKFGQADDEEETAPQLHGPKRTVNYLQNLSPDHIDLILEFAEWPVRQDPELGMEIFLADTENAETLPRERVLDFLQGIDVNLAVRYLEHIIGELNDMTPDLHQKLLILYLNRLKKHQAKEWEFSSLDDYVNWQSKFLNMLRSSSQYSPAKILDRLDRDDPEFFEARAIVFSKMGQHRQALEIYVFKLEDYVKAEEYCNHLHKVEDTTAADGSVSRCVALLPYEDDKPSIYLTLLSLYLSPPHGYKPRYGPALEVLAKHGSRLPPNSALDLIPESLPVKELEFYFKGRMRAANTILNESRIVANLQKAEDIKTQAQLLVGEGTDGRSTRSRHVTITEERVCGICHKRIGGSVINVFPDNTVVHLGCANRMR

SEQ ID NO: 98 - DNA, 5623 bp, Aspergillus niger
gacggaaatctgcctccagaagtaaacgtacctcgtccctcgcccaattcggcaagggtctgctctgcgggaattctgtatgtcttccgaagctgctcccgacgctcaaactcgtcgatatcggtgttcttcttgtagccgaacaacgttccaccggtgtattcgaaagcgcccgtggcggtggccaaagcgacgccgtagcccaggagggcggggaatgtgcgagctgcggacctgtcagaaccaatgcttgatcaattgaacggtcggatcgcgggcaacagacctcggagacccaggatggcgccggagaagaaacctcccagagcgacgttccagtggtcttccttctcacgaaggttggcggatgcggtcttcacgaattcgtaggtacctcccatggcggctggacgcgaaaatcgttagcaaccgactaaatccaagacatattgcccaagcgtccacaattgcattcataccgaagataccgacggtaccaccgctccggatgaacacgcccagcgggccgacgttctgtctggtgagggtgttctggacggccgaggcgaaaagacccgctccaccagtgagcatagtggtcttcatcgatgccgcgatcgcatccttgggatggtagtgctcttcgtggtgcggagccatggtggcggttgaggagctggggattaagctgtggctggcactctcgaatgtcgtccgaacggagatgagattcgatgaatttgggacctcgcgctttctgccccaccagaccgccttccccaggttcccagctttcccagtccgtttgaccagagcatctgatctatgcccaaaactctcgattttctcccttggcgtgcgggcatcgctctctatcacctcctgcacgctcggtggtcgtcttttggtgtttctaaagctgttcgcgttgagagtggcaggtcgttcgctgggaacttgccgcctgctctgcctcacttgctgcggtgactccccgctgttgagacgatctaacggtccagctttctgtttccaatagaatcgaatgtgttcaatacgataacgtggatcatccctgcaagagagtcgcgtcgttatcctttgtttaaattacggactttatgtgaataacctcacagatagctttagagttcctttgctaaggttcgccgacaactgtgagctcataagagcctactcatgtcgtctccgctgaagcctggtatgcatcacagtccccttgagtccggatcactttttcagagtccggagtatctgcagtgaatgcgcatctgaactgatgatggtttcttcgtcttctaggcaagactgccccacgtcttgtgcaagatatccacgactatgaccctgtccatcctccaggctccggccgcaacctgctgtcggaggtccccccggtcttccccgatcactatattggaccatcagagttcatatcgccttcagcatgccgtcatacttatgtgatcaagtcgaaacagagcttcctaccaaaaccagagcagagaagcagctcaggcaaccccaccaaagtatcagcgatatgctccaagtgccgataccatctacagctggtcgtgacatcgacacctgggatcggcagccagagtttgccgggacacatacaccatctggtttataagtcagggaggcagagaggaggtgcatcggcagaagaaatcacacccaagggccaggtggcggagacattccattatgactgctcctacctcacttgtccagcggcagtgtccgtcagaattgtctctcctgtgctccatccagaatgggtacaactcttgacagatcctgagttgctgcagcagcgagcagatgaggcgattcaaacacaccccgagcgcctggaagggatagcccggccgcagcccatcaatgtcttggaaaacttgcacgcatatatcagcaatgcctttaatcccagtcaacagaataaatctatatcagcgattaacaagaggttcataacgtgcttcggtgttgaagggaagccttgcaaagacctgttagaatttttggggttctccgtcaaggtctgtacatgtctgccgattgctgcaatatcatggcctaactctatatagaatgaaggtttttgggagcccccgcgccccaacgcctgggcggaaatcccctaccaggatcaactcaaaatcttcctcgatgatgttctacatgagcttgctgtactcatcgagcagcggccagtgcttgagaagaaaggccatcaggtggatttctcaaacaagatagcaagggatgacctcttgaatgctctggaagcattagactgtaggtcaaataatcactctttcggaggctgcatgcttaccaagcttctttaagaccagaaggctctcaatgtcgacacatttgaaatgccccctgctccgtacgtactatacaagcttgacctattgacgtggactgacgcaggtgtagttactatgaagatctgggcgtcgtggaagatatgtctgcgcaattgattattgaggcgttcaatcgccaggtcgccgtagaccctggtcgcatgcctacatacctgaaatgcctcaaggcgataggtagccttagagggggctacgaagctgacgccattgatcaagcagttcaggtggcttatgccgacggcaagtacactgatgacgacgtcatcaatgcttacaagtacttcggtttaacacacgacgacccgcggcttactgaggacagcatcattgggaccttccatgcttacttgagctccaccactcaggagacagactcacgcagagaactgtggaagataggcgacagcaggcgtagtgagcgcattaagtcagcggctgaagatagtgagatctccttacgacgagcgtttgaagtccgcagctaacagggtaaaggagtggcaactgttgagcaagcccaagtttaccttggcgtcagcgaggaaacaagcgacgactttattatggccatgtatacagctaaggtacagcgctgccgattatgagtttgtgtagatgtgcgctaatgttctttctaggtcaatgacactccatcgagcagggatctcgcgcgccgcgccgttgaattcattgcggaggcgcggaaatcggatgctcttcgacacttcgtcaggactggcgagatgacggccggtgagatggatatcggggatgcctaccggcttcttcaaatccccgatcgtacggttgatgaagcagcaatcatggcagcttatacgatttgcgtcgacgaagctccgggacaggctgaaacgtacaaccaagccttgcgtataattgctaaagacaagaatagcactctgctaagcagtatggtctctggtgatgatacaaagccggaccgtaatatgtcggattggcctgttggattgcagaacattggcaacacatgctatctcaatagtctactacaattctatttctctgtgcgcccgtacagggagatggtcttggattttgagagcttcaagatggagttgactgatgagagcctgagcaagaaacaggtgggatctcgcaaggtttccaagaaggaggtggaacgttcacaaaggtgtaagtagcagtatttcacttgatttaccgcatagctaacgctgattctatatagttctcagagaattacggacgctcttttccgacatgattacttccccatcctctcatgtcacgccgggccgggagttggcgcggttgacattgatcagtccttccaacgaagcagcgatacgtcgtcggtctacaatctccgcgtacaggcccgccggtgccttaggtgaaatcaacggcatgccggtactaggacctcttgggccgccgcaaccgattccggagaagcaagtagagaatgagacggagaaccaggcggttaccgaaagcgaggtgattaagcgctcaacagttagcgatgtcgatagcgaggccacacttgtctctgatggtgtcaagaatgacatcaaagctcccccggttgacgataaagagaacgagccaccggctgatctggacctgaatgacgtgcagaatgagccaagttctgattccgctgacatagggtcccccggcgatacaacacccatagacaatgtcgaaccttccaatcgaccaccgccagtgcctccgcggcccaccccgcaagttgacccccagaagcagcttatagaagaggtagagatcggagcgcagcaggatgtgacggaagtcatcaacaacgtgcttttccaaagccaatgtgcgattcggcccattgctcattctccggagggtgagcaaattgatcaagtgaaagagtaagttaggagccttttgggcacgattatttcaagactgacgccttgtctgtagtcttttttacggccgaacccgatcttatattgcctcagaaaaaggcgtccggtcgaaagaagagtggtggtgtgacatcaaaatcgatgttgcaactggcccgcgcgacatttatgcagccattgacggtgcctttgacgtacagaaggtgaatgtggagaactcggtggctgagcagtatggtgctatcagcaagctcccgccagtgcttcagatccaggttcagcgtgtccagtttgaccccacgacgaagcgctcttttaaatccactcaccatcttggattgaaggagacgatttatctcgaccgatacatggactcgcaacaaccccagttcctggaccggcgacagcagtgctggcaatggaaaaattcgctcagagagctcgaggtgcgccgcgcggagttactgcgccaagtggtaggttgcgaccgcatcgttcgttgtgagcccagacatctaattcttattctaggattccgacggcatggatacggcgggattactcaacagcgctaaggaagtactcgaagatttggcagctatgagagaagagcccgattatgcagaggacgcgattgactttgacacgcaaataatcaccgaggttgatcagctttctcaaatcgcaaaggctgacttgaactgtacgtcctcgcttcccaagattcggcctctggtacgtgggcgctgacctgagacagatgtcgaaaaccaaatccaggagacccaggacaagatctccgctcagttcgccgactacaagtacctcgcctatcgcctgtatgccgtgttcgtccaccacgggtccgtttccttcggccattactacatttacatcttcgacttcgaacggaacgtctggagaaaatacaatgacaactatgtcaccgaagtaaacaacctggacgagatcttcaaggacgagggacagcccaacccgcccacgccatacttcctggtatacgtcaacgacgcgatgaaggatcggctcgccaacccggtctgcagggaaatcttggaagcttccacggcgaataccaatgaagatatggacatgaatccaccagcgtacgacgagatctggacggaccagagcggatcaggtacggtagtcgatcaccccatgacggaggctaaagacgatgccaatgcgggacacggcaagactgcttggggttggccaccgaagacaagcactgacttagatcatgtgaggtggtag

SEQ ID NO: 99 - DNA, 3669 bp, Aspergillus niger
  CDS (1)..(3669)
atgtcgtctccgctgaagcctggcaagactgccccacgtcttgtgcaagatatccacgactatgaccctgtccatcctccaggctccggccgcaacctgctgtcggaggtccccccggtcttccccgatcactatattggaccatcagagttcatatcgccttcagcatgccgtcatacttatgtgatcaagtcgaaacagagcttcctaccaaaaccagagcagagaagcagctcaggcaaccccaccaaagtatcagcgatatgctccaagtgccgataccatctacagctggtcgtgacatcgacacctgggatcggcagccagagtttgccgggacacatacaccatctggtttataagtcagggaggcagagaggaggtgcatcggcagaagaaatcacacccaagggccaggtggcggagacattccattatgactgctcctacctcacttgtccagcggcagtgtccgtcagaattgtctctcctgtgctccatccagaatgggtacaactcttgacagatcctgagttgctgcagcagcgagcagatgaggcgattcaaacacaccccgagcgcctggaagggatagcccggccgcagcccatcaatgtcttggaaaacttgcacgcatatatcagcaatgcctttaatcccagtcaacagaataaatctatatcagcgattaacaagaggttcataacgtgcttcggtgttgaagggaagccttgcaaagacctgttagaatttttggggttctccgtcaagaatgaaggtttttgggagcccccgcgccccaacgcctgggcggaaatcccctaccaggatcaactcaaaatcttcctcgatgatgttctacatgagcttgctgtactcatcgagcagcggccagtgcttgagaagaaaggccatcaggtggatttctcaaacaagatagcaagggatgacctcttgaatgctctggaagcattagactaccagaaggctctcaatgtcgacacatttgaaatgccccctgctccttactatgaagatctgggcgtcgtggaagatatgtctgcgcaattgattattgaggcgttcaatcgccaggtcgccgtagaccctggtcgcatgcctacatacctgaaatgcctcaaggcgataggtagccttagagggggctacgaagctgacgccattgatcaagcagttcaggtggcttatgccgacggcaagtacactgatgacgacgtcatcaatgcttacaagtacttcggtttaacacacgacgacccgcggcttactgaggacagcatcattgggaccttccatgcttacttgagctccaccactcaggagacagactcacgcagagaactgtggaagataggcgacagcaggcgtagtgagcgcattaagtcagcggctgaagatagagtggcaactgttgagcaagcccaagtttaccttggcgtcagcgaggaaacaagcgacgactttattatggccatgtatacagctaaggtcaatgacactccatcgagcagggatctcgcgcgccgcgccgttgaattcattgcggaggcgcggaaatcggatgctcttcgacacttcgtcaggactggcgagatgacggccggtgagatggatatcggggatgcctaccggcttcttcaaatccccgatcgtacggttgatgaagcagcaatcatggcagcttatacgatttgcgtcgacgaagctccgggacaggctgaaacgtacaaccaagccttgcgtataattgctaaagacaagaatagcactctgctaagcagtatggtctctggtgatgatacaaagccggaccgtaatatgtcggattggcctgttggattgcagaacattggcaacacatgctatctcaatagtctactacaattctatttctctgtgcgcccgtacagggagatggtcttggattttgagagcttcaagatggagttgactgatgagagcctgagcaagaaacaggtgggatctcgcaaggtttccaagaaggaggtggaacgttcacaaaggtttctcagagaattacggacgctcttttccgacatgattacttccccatcctctcatgtcacgccgggccgggagttggcgcggttgacattgatcagtccttccaacgaagcagcgatacttagcgatgtcgatagcgaggccacacttgtctctgatggtgtcaagaatgacatcaaagctcccccggttgacgataaagagaacgagccaccggctgatctggacctgaatgacgtgcagaatgagccaagttctgattccgctgacatagggtcccccggcgatacaacacccatagacaatgtcgaaccttccaatcgaccaccgccagtgcctccgcggcccaccccgcaagttgacccccagaagcagcttatagaagaggtagagatcggagcgcagcaggatgtgacggaagtcatcaacaacgtgcttttccaaagccaatgtgcgattcggcccattgctcattctccggagggtgagcaaattgatcaagtgaaagatcttttttacggccgaacccgatcttatattgcctcagaaaaaggcgtccggtcgaaagaagagtggtggtgtgacatcaaaatcgatgttgcaactggcccgcgcgacatttatgcagccattgacggtgcctttgacgtacagaaggtgaatgtggagaactcggtggctgagcagtatggtgctatcagcaagctcccgccagtgcttcagatccaggttcagcgtgtccagtttgaccccacgacgaagcgctcttttaaatccactcaccatcttggattgaaggagacgatttatctcgaccgatacatggactcgcaacaaccccagttcctggaccggcgacagcagtgctggcaatggaaaaattcgctcagagagctcgaggtgcgccgcgcggagttactgcgccaagtggattccgacggcatggatacggcgggattactcaacagcgctaaggaagtactcgaagatttggcagctatgagagaagagcccgattatgcagaggacgcgattgactttgacacgcaaataatcaccgaggttgatcagctttctcaaatcgcaaaggctgacttgaactatgtcgaaaaccaaatccaggagacccaggacaagatctccgctcagttcgccgactacaagtacctcgcctatcgcctgtatgccgtgttcgtccaccacgggtccgtttccttcggccattactacatttacatcttcgacttcgaacggaacgtctggagaaaatacaatgacaactatgtcaccgaagtaaacaacctggacgagatcttcaaggacgagggacagcccaacccgcccacgccatacttcctggtatacgtcaacgacgcgatgaaggatcggctcgccaacccggtctgcagggaaatcttggaagcttccacggcgaataccaatgaagatatggacatgaatccaccagcgtacgacgagatctggacggaccagagcggatcaggtacggtagtcgatcaccccatgacggaggctaaagacgatgccaatgcgggacacggcaagactgcttggggttggccaccgaagacaagcactgacttagatcatgtgaggtggtag

SEQ ID NO: 100 - protein, 1222 aa, Aspergillus niger
MSSPLKPGKTAPRLVQDIHDYDPVHPPGSGRNLLSEVPPVFPDHYIGPSEFISPSACRHTYVIKSKQSFLPKPEQRSSSGNPTKVSAICSKCRYHLQLVVTSTPGIGSQSLPGHIHHLVYKSGRQRGGASAEEITPKGQVAETFHYDCSYLTCPAAVSVRIVSPVLHPEWVQLLTDPELLQQRADEAIQTHPERLEGIARPQPINVLENLHAYISNAFNPSQQNKSISAINKRFITCFGVEGKPCKDLLEFLGFSVKNEGFWEPPRPNAWAEIPYQDQLKIFLDDVLHELAVLIEQRPVLEKKGHQVDFSNKIARDDLLNALEALDYQKALNVDTFEMPPAPYYEDLGVVEDMSAQLIIEAFNRQVAVDPGRMPTYLKCLKAIGSLRGGYEADAIDQAVQVAYADGKYTDDDVINAYKYFGLTHDDPRLTEDSIIGTFHAYLSSTTQETDSRRELWKIGDSRRSERIKSAAEDRVATVEQAQVYLGVSEETSDDFIMAMYTAKVNDTPSSRDLARRAVEFIAEARKSDALRHFVRTGEMTAGEMDIGDAYRLLQIPDRTVDEAAIMAAYTICVDEAPGQAETYNQALRIIAKDKNSTLLSSMVSGDDTKPDRNMSDWPVGLQNIGNTCYLNSLLQFYFSVRPYREMVLDFESFKMELTDESLSKKQVGSRKVSKKEVERSQRFLRELRTLFSDMITSPSSHVTPGRELARLTLISPSNEAAILSDVDSEATLVSDGVKNDIKAPPVDDKENEPPADLDLNDVQNEPSSDSADIGSPGDTTPIDNVEPSNRPPPVPPRPTPQVDPQKQLIEEVEIGAQQDVTEVINNVLFQSQCAIRPIAHSPEGEQIDQVKDLFYGRTRSYIASEKGVRSKEEWWCDIKIDVATGPRDIYAAIDGAFDVQKVNVENSVAEQYGAISKLPPVLQIQVQRVQFDPTTKRSFKSTHHLGLKETIYLDRYMDSQQPQFLDRRQQCWQWKNSLRELEVRRAELLRQVDSDGMDTAGLLNSAKEVLEDLAAMREEPDYAEDAIDFDTQIITEVDQLSQIAKADLNYVENQIQETQDKISAQFADYKYLAYRLYAVFVHHGSVSFGHYYIYIFDFERNVWRKYNDNYVTEVNNLDEIFKDEGQPNPPTPYFLVYVNDAMKDRLANPVCREILEASTANTNEDMDMNPPAYDEIWTDQSGSGTVVDHPMTEAKDDANAGHGKTAWGWPPKTSTDLDHVRW

SEQ ID NO: 101 - DNA, 4934 bp, Aspergillus niger
gcgtctttggagctgctatcttgaggtttcacgggcggattctggaggtactttcggacgttcgagtctaggagcgatatggaagctctgtaagaagaaagtttcgattcaatagagttttccatttgggacaattcgcgaagaatgtgttgatgtcttgctttcatttgggacaacctagtctccatctcatgtatatcctcctcaagcttgcgactttcctggcgcaaggcaacggtgtgctggctttcccggttatcctgaatagtcgaaatggcatcttctagcccagcgcgatggatattgaagccattgatatctgccaacgcctgtgtcctttcatcaatccggaaggttagtatctctcgctcttcctcgcgaagcctcaagaggtcgtatatagatctgaatatcccctttctggcagcagacaacccgattttctctggagccggttggcggattggtatagttggaggacgctgcgaactgcttgtgtccgaggtcggtgtataagttccgtcggagatggcgccattctgcggggatccgttaagagtagccagaagtccttcactctgagcatcgattaatatctgtaaattacgctgaatctgtctggcctggcggtcaatgtagacgatagggtcctgatgaagggaagaggtcccgataggcagggccggcaggtgtttgtctccagcttgcggaagaatcgacgacatttggaaggggaactggatcgcagggaatcaaattaccaatacatgagaatcccctccttatggatattaaaatgaaacaaaaccgacagctcagaacccaagtgacggtgaagtcttggaccagatcacgagtgtttgtgcaactgccctgtccggtcccatgccatcataggtcacgtgccatctctaggggtttctgcaggaaccacgggaacctttcgacagcttccattgacgtgtgtctcgctgctctagaggaagcttcctaatcactccgagctcatctcttccatcatctgttattttgttgccttgactccttcatcgccctttttctgtatatttcgttctttgaggtgcttagatctccaataaacaccccatccattcacccacgccctaccctcaatctcacagctccgtcgaagctgtcgcctcactcccctcgcgacagcacacccgtcctcccacagcgatggttggactcgcttcggccgctggcctcgtcggctttctctcagagccggatcctgagttgagagtctttgctctgaagacgctggactcacaaatcgacctgctctggacggaagtcgtggatgctgttcctcaaatgttcgtactggcccttgtctctccatctgcctcataccttcatcataaataccccatcctgtcgaccggccacaggctgcatcgatgctgacattttgcgattcagagaagctctttacgaagatgaatcgttccccgagcgcgagctcgccgccctggtcgccgcaaaggtgtactaccaccttcaagaatacaatgagagtatggtatttgctctgggagctgggaagctcttccagttggatagcggtggcgagtttgaggaaaccattatcggtaagaacagccgttccccaggcatttgctcacccagagtgtcatcttaccgggatatacagcgaaatgcgtcgataccttcgtctcgctctcggcggcacagcggcccgtcgcgggtgaccaccaagccaatctgaacacctctttccccacctctggcgaaggcgccacaagtacttctgccagtttgacatccccgatcacacctttctcgcaatcagccttgccatccaagtcgctcttgtctaggcaagaggtgcccggagtggatgctgcttacccagggggtgaagatgcgggtgtgaaccatgccgaagaaacccctctagtcctgaagcgtggtgttcagggccaccttcaaaccgttatcgatcgtctgttcgagcagtgcttcgtccagaagcgctaccgtcaagtcattggaatcgctattgaagcaaagaacctcgatgtgcttagaaagacgatcctccgggccagcgaggatgagaagaaacagaacggagagtcgcgacgcagtgaggaactcatggagtacgtgctcgatatctgcatgggaatcgtgcaggaacgcggtttccgcaacgaggtatataattcattaagatgatggcaaaacacccagagctaacccttgctttgaagatcctcaaactcatcctcgaactcctcaacgagatcccggcccccgattacttctccatcgccaagtgtgttgtatatctcaacgaacattccatggcgtcggtcatcctccgtcaactagttgagaagggagacgctcgttcgctcgctgtcgcctaccaaatctctttcgatctctacgataacagtacgcaagaattcctgcagaaggttcgccaggaaatttcggagctcgtgccggagaatgatgagtccgaacaggaggcagcaggtggggaccaagaagagtcgaaggaatccgatcctttgctggacagccagtctaggtctattggggattcgcgcacgaagatctcacccgaagcacgcacggccttcaagagcattcgtgatattctcgatggcgtcaagaccaaccagttgaacgtggaattcttattccgcaacaacaaggccgatattgccatcatgaacaagctccgcgatagcctagaagctcgtaactctatcttccactctgcggtttcgctttcgaatggtttcatgcatgccggtacagcgcacgacaagttcttccgggataaccttgactggttgagcaaggctgtcaactggtccaagttcacggctacagctgctcttggtgttatccacaggggcaatttgagccaaggacaaaagctcctgcagccttacctgcccaaggaacgctctatcaccaatgtggcagcgggcggacacagcggagccagctcgatttacagtcagggaggatctttgtacgcttatggtctgatcttcgccaatcatggtggtatggccgttcctgtgatccgggattacttcaagaaggctacagatgaggtcatccagcatggtggagctctgggtcttggtgttgcaggcatggctagtggcgatgaggggctttatgaggaccttcgcaatgtgttgtacaccgactcggctatcaacggtgaggctgtcggtcttgccatgggtcttatcatgttgggtacaggtaatatgaaggtcctcgaggatatgattcagtatgcccatgacactcaacacgagaagatcgttcggggtttggctatgggcatggccttgatcatgtacggtcgtcaggaagctgctgatgagctgattaacggccttctgggcgaccctgatcctgctctccgctacggtggtatcatgactatcgcccttgcctactgtggtagcagcagcaacaaggctgtgcgtaagctccttcatgttgctgtcagcgatgtgaacgatgatgttcgacgaattgctgttctgagcttgggattcattctgttcaggaagcatcagagtgtacctcgtatggttgagctactgtctgagtcttacaaccctcatgttcgttatggtgcggcaatggcactgggtatctcttgcgccggaactggtctggatgaggccattgacctgctcgagccgatgctcaaggattcaacggacttcgtgagacagggagcgctgatctcgttggccatggtccttgtgcaacagaacgaggccatgaacccccgtgtcagctctctccgcaaggtcatgatgaagatgattggcgatagacacgaggatgcaatggccaagttcggctgcgctgttgcccttggtatcatcgacgccggtggtcgtaactgcaccatcagcctccagacgcaaaccggcaacctgaacatgcccggtatcgttggcgctgccgtcttcgtccagtactggtactggttccctctcacccacttcctgtcccttagtttcgccccgacctccgtcattggtgtcgaccagaagctcgaggtgccctacttcaaattccacagcaacacgcgacccagcctctttgactaccccccggagcaacaggttaaagccgaagaggcgcccgagaaggtcaagacagccgtcctttcgaccaccgcccaggccaagcgccgtgcacagcgtcgggagaagcagcaaaggcgcgagagcatggacattgatcagacccctacgactcccaaggtgtcggaccaggctgacaagatggatacggatgagacagcagtgaagacggaagaagagaacaaggagggtgagaaggaggctggtgaggggcagaagaagaaggttgagcgtgagaaggtcggatatgagctcgaaaacatgtctcgggttcttcccgcccagctcaagtacctcacattccctgacccccggtatgagccggtcaagcgggtacgtttcccttcccaattatttctgtgttatattgcgatgaatgccatgctaactcgaatccagcctaccggtggagttgtggtcgtacttgacaagacccccgaggagccccgcgagacgatcgagatgacggccagcaaggagaccagcagggaggctagacagcctgcacccgccgcggatgtcgcggagtccctgcaggaccgactacaggccaccatgggagccgctggtctgcagacacctcagcgtggagctgggcgcttcccctttggtgcggatctgggcccgtttgcgggcgctgccgctgctgccggtgtactgacggctgtggatgaggacgaggaaggcggcgaggaggcgccggtgccgaatgagtttgaatatgaaaccgagccagaagacgagtag

SEQ ID NO: 102 - DNA, 3444 bp, Aspergillus niger
  CDS (1)..(3444)
atggttggactcgcttcggccgctggcctcgtcggctttctctcagagccggatcctgagttgagagtctttgctctgaagacgctggactcacaaatcgacctgctctggacggaagtcgtggatgctgttcctcaaatagaagctctttacgaagatgaatcgttccccgagcgcgagctcgccgccctggtcgccgcaaaggtgtactaccaccttcaagaatacaatgagagtatggtatttgctctgggagctgggaagctcttccagttggatagcggtggcgagtttgaggaaaccattatcgcgaaatgcgtcgataccttcgtctcgctctcggcggcacagcggcccgtcgcgggtgaccaccaagccaatctgaacacctctttccccacctctggcgaaggcgccacaagtacttctgccagtttgacatccccgatcacacctttctcgcaatcagccttgccatccaagtcgctcttgtctaggcaagaggtgcccggagtggatgctgcttacccagggggtgaagatgcgggtgtgaaccatgccgaagaaacccctctagtcctgaagcgtggtgttcagggccaccttcaaaccgttatcgatcgtctgttcgagcagtgcttcgtccagaagcgctaccgtcaagtcattggaatcgctattgaagcaaagaacctcgatgtgcttagaaagacgatcctccgggccagcgaggatgagaagaaacagaacggagagtcgcgacgcagtgaggaactcatggagtacgtgctcgatatctgcatgggaatcgtgcaggaacgcggtttccgcaacgagatcctcaaactcatcctcgaactcctcaacgagatcccggcccccgattacttctccatcgccaagtgtgttgtatatctcaacgaacattccatggcgtcggtcatcctccgtcaactagttgagaagggagacgctcgttcgctcgctgtcgcctaccaaatctctttcgatctctacgataacagtacgcaagaattcctgcagaaggttcgccaggaaatttcggagctcgtgccggagaatgatgagtccgaacaggaggcagcaggtggggaccaagaagagtcgaaggaatccgatcctttgctggacagccagtctaggtctattggggattcgcgcacgaagatctcacccgaagcacgcacggccttcaagagcattcgtgatattctcgatggcgtcaagaccaaccagttgaacgtggaattcttattccgcaacaacaaggccgatattgccatcatgaacaagctccgcgatagcctagaagctcgtaactctatcttccactctgcggtttcgctttcgaatggtttcatgcatgccggtacagcgcacgacaagttcttccgggataaccttgactggttgagcaaggctgtcaactggtccaagttcacggctacagctgctcttggtgttatccacaggggcaatttgagccaaggacaaaagctcctgcagccttacctgcccaaggaacgctctatcaccaatgtggcagcgggcggacacagcggagccagctcgatttacagtcagggaggatctttgtacgcttatggtctgatcttcgccaatcatggtggtatggccgttcctgtgatccgggattacttcaagaaggctacagatgaggtcatccagcatggtggagctctgggtcttggtgttgcaggcatggctagtggcgatgaggggctttatgaggaccttcgcaatgtgttgtacaccgactcggctatcaacggtgaggctgtcggtcttgccatgggtcttatcatgttgggtacaggtaatatgaaggtcctcgaggatatgattcagtatgcccatgacactcaacacgagaagatcgttcggggtttggctatgggcatggccttgatcatgtacggtcgtcaggaagctgctgatgagctgattaacggccttctgggcgaccctgatcctgctctccgctacggtggtatcatgactatcgcccttgcctactgtggtagcagcagcaacaaggctgtgcgtaagctccttcatgttgctgtcagcgatgtgaacgatgatgttcgacgaattgctgttctgagcttgggattcattctgttcaggaagcatcagagtgtacctcgtatggttgagctactgtctgagtcttacaaccctcatgttcgttatggtgcggcaatggcactgggtatctcttgcgccggaactggtctggatgaggccattgacctgctcgagccgatgctcaaggattcaacggacttcgtgagacagggagcgctgatctcgttggccatggtccttgtgcaacagaacgaggccatgaacccccgtgtcagctctctccgcaaggtcatgatgaagatgattggcgatagacacgaggatgcaatggccaagttcggctgcgctgttgcccttggtatcatcgacgccggtggtcgtaactgcaccatcagcctccagacgcaaaccggcaacctgaacatgcccggtatcgttggcgctgccgtcttcgtccagtactggtactggttccctctcacccacttcctgtcccttagtttcgccccgacctccgtcattggtgtcgaccagaagctcgaggtgccctacttcaaattccacagcaacacgcgacccagcctctttgactaccccccggagcaacaggttaaagccgaagaggcgcccgagaaggtcaagacagccgtcctttcgaccaccgcccaggccaagcgccgtgcacagcgtcgggagaagcagcaaaggcgcgagagcatggacattgatcagacccctacgactcccaaggtgtcggaccaggctgacaagatggatacggatgagacagcagtgaagacggaagaagagaacaaggagggtgagaaggaggctggtgaggggcagaagaagaaggttgagcgtgagaaggtcggatatgagctcgaaaacatgtctcgggttcttcccgcccagctcaagtacctcacattccctgacccccggtatgagccggtcaagcggcctaccggtggagttgtggtcgtacttgacaagacccccgaggagccccgcgagacgatcgagatgacggccagcaaggagaccagcagggaggctagacagcctgcacccgccgcggatgtcgcggagtccctgcaggaccgactacaggccaccatgggagccgctggtctgcagacacctcagcgtggagctgggcgcttcccctttggtgcggatctgggcccgtttgcgggcgctgccgctgctgccggtgtactgacggctgtggatgaggacgaggaaggcggcgaggaggcgccggtgccgaatgagtttgaatatgaaaccgagccagaagacgagtag

SEQ ID NO: 103 - protein, 1147 aa, Aspergillus niger
MVGLASAAGLVGFLSEPDPELRVFALKTLDSQIDLLWTEVVDAVPQIEALYEDESFPERELAALVAAKVYYHLQEYNESMVFALGAGKLFQLDSGGEFEETIIAKCVDTFVSLSAAQRPVAGDHQANLNTSFPTSGEGATSTSASLTSPITPFSQSALPSKSLLSRQEVPGVDAAYPGGEDAGVNHAEETPLVLKRGVQGHLQTVIDRLFEQCFVQKRYRQVIGIAIEAKNLDVLRKTILRASEDEKKQNGESRRSEELMEYVLDICMGIVQERGFRNEILKLILELLNEIPAPDYFSIAKCVVYLNEHSMASVILRQLVEKGDARSLAVAYQISFDLYDNSTQEFLQKVRQEISELVPENDESEQEAAGGDQEESKESDPLLDSQSRSIGDSRTKISPEARTAFKSIRDILDGVKTNQLNVEFLFRNNKADIAIMNKLRDSLEARNSIFHSAVSLSNGFMHAGTAHDKFFRDNLDWLSKAVNWSKFTATAALGVIHRGNLSQGQKLLQPYLPKERSITNVAAGGHSGASSIYSQGGSLYAYGLIFANHGGMAVPVIRDYFKKATDEVIQHGGALGLGVAGMASGDEGLYEDLRNVLYTDSAINGEAVGLAMGLIMLGTGNMKVLEDMIQYAHDTQHEKIVRGLAMGMALIMYGRQEAADELINGLLGDPDPALRYGGIMTIALAYCGSSSNKAVRKLLHVAVSDVNDDVRRIAVLSLGFILFRKHQSVPRMVELLSESYNPHVRYGAAMALGISCAGTGLDEAIDLLEPMLKDSTDFVRQGALISLAMVLVQQNEAMNPRVSSLRKVMMKMIGDRHEDAMAKFGCAVALGIIDAGGRNCTISLQTQTGNLNMPGIVGAAVFVQYWYWFPLTHFLSLSFAPTSVIGVDQKLEVPYFKFHSNTRPSLFDYPPEQQVKAEEAPEKVKTAVLSTTAQAKRRAQRREKQQRRESMDIDQTPTTPKVSDQADKMDTDETAVKTEEENKEGEKEAGEGQKKKVEREKVGYELENMSRVLPAQLKYLTFPDPRYEPVKRPTGGVVVVLDKTPEEPRETIEMTASKETSREARQPAPAADVAESLQDRLQATMGAAGLQTPQRGAGRFPFGADLGPFAGAAAAAGVLTAVDEDEEGGEEAPVPNEFEYETEPEDE

SEQ ID NO: 104 - DNA, 3055 bp, Aspergillus niger
atccgccagacggcttcataatgatggatctgttggtgaaagcacagcagcagcagcagagggaccagagcaccaaaggcgaacccaagcgaggccgacaggtcggcgatcatggcaaatataaacccgcgtttgtttcggacgcccagatcctcgtcggtggcttctgcagctccagccccggcgaccggatactccctggggaacgagtgagtaacagatccctgattgcttgagatgataataagcgaactcacccacccgcacccacgccagcgattcctcttgcgatgatcagcatccaaaacatcccatctcgattcgttccgctcgcaccagcgctcaaagcgatccctagcactaggataacggtggtcaagactgcgccagtcttccggcccaacctatcggacaggtatccgaaggataacatgccaatgatcatacctaccatgaaggcattggacagacgagatgcgacagccgtggtgagagcctttgggtagatgacttccatgatcaattcgaggttgccgatgatggatgcgttaaaaccgtcggagccaatggccagaccggaaaacacaatcatcagcaagaccgaaagtttggaagtctttcgacggctttgatctggggccacatcttcggcggcatctgatgatatctgcacctgtgtctgtttggcggactgagctgcttccgtcgtctgtaccgagtcttgatcctttttgcgatccatctcagcggtcagccttgcgtcttcctcgatggcctaacagttatctaaacccgactggaccccgccatgatgaggtgtacgtatttatctctgctgagccttgcctatctgtcccgtctgtcggccgatccgagcctcttttctcccgcaagcgactgcgccaacatatctgataaggccaatgaagcacggcctgtcccctcctcggcctgaatggcggaccaaccgcgacattcgccgataagctgcacgtcgcgaagcgaatggccagcgactccaatcaaggggaatccagccgggcggggaatctctagctggcatccttcagcgcatcttcccctcttttcaaggcctgcaggcgctcggatctcctccgaactcctgcagaagcacggcgataaatccattgtctggaactctcaaagttacttgtgctttcgttcggtctccgcagcatcatgctggacaaacagactgagtctctcccgctggcggaggagataccgctactccgtcagccaccgcatcaacaccgaaagactgttctgcgctttataactggcgctggtctactattgcttaccatctacacgctcttcccggtgagtatgcttcgccatcaggatcaacggcttggatctaactccagggcagaggctatcgccctttacctccattaagcaacccttatccgtctcgccatatgaatccttcgagagatgttcaattgagaatctccgacagacgggatactattttctggatactgctacgcccatcgcagttgaggagttcgatgagcgccgcaaccgtctcgcgagggctctggtcgccgatggggcggacgcctttgtcgtggagccggggtatacgtttaaatactatgccaacgtgagccagccggaatgggaggtgtgggaggtcagcgctctttctccccagaatgccatatgtgtactaattccgctcagccggaggaacgcccctttcttatggtggtgcagccttatcgtcactcgtcgggccatgttaccgcaaagacaaccttcctagccccatccttcgaggcggagcgagcccgactgctgaacatgccttttctcgaaccgatcgagatcattccatgggaggaacactggaacccatacgacacgctcaaaaattccgtcatcttctcggctctggatcgagcacctcgactcatggtggacgaggaaatgagggactttatccaacggggtcttggtcactccgggttcgaaatcgtcgggctgatgggagaagtggagcgagtccggcagatcaaatccggcaccgaagtgggaatcctccgcgccgtgaacacgggaactgtggaagccgtgcggcagatgcggaaatgttcgtgatccccgacttggtcgcactgtggacgggctgaccctaaataggcctgtaccccggtctaaccgaaagtgagatcgcaagtgccctggacaatacccttcgctcggctggtttggagccattttttgatattgtcttgtttggtatgtgtccgaccgctgcaaatgtgcgaggctgaccgtggaggtagacgaaaatgccgccaacccacatggtggtaccaatggctcgaaggttctcgagccggaaacctttgttctgattgacgtagggtgagcttcatacgcaggatcgcttcccgtctcgccgttgttgctgctgaccgatgccagcgcccatctccttgggtactcgtcggatatttgtcgaacattcttcccgccgttccttgagccatcgaaaccggatatacccaccccagcacgtttgcgagagaagttggaggtatacgtcattcctcacatgcgcaagagaggtagttttattgacttttgtaggtgtgggacattgtctttgaagctcaaacccgatccatagggcagttccaggtgaacgccagtgctgccagcgtcgacatcgctgctcgggaggtgatcacggacggcgggtatggggaagccttcacccatcgtgttggccacggaattggaatcaaaggtgagttgcgacggtctgtgtgtgggcattggaggtgtgtctgtggggtcggactcatgctgatgtttcgacgtagcccacgaaagcccctatttgaaccagggcaaccatgccactctcctccaagccgggatgacgttcacctcggaacctggggtgtatctggtggatcgattcggggtgcggcacgaggacatctttctggtgcgggagggtggggaagccgagctgttgaccggtcgtcgagcatatgggccttgggacccatag

SEQ ID NO: 105 - DNA, 1467 bp, Aspergillus niger
  CDS (1)..(1467)
atgctggacaaacagactgagtctctcccgctggcggaggagataccgctactccgtcagccaccgcatcaacaccgaaagactgttctgcgctttataactggcgctggtctactattgcttaccatctacacgctcttcccgaggctatcgccctttacctccattaagcaacccttatccgtctcgccatatgaatccttcgagagatgttcaattgagaatctccgacagacgggatactattttctggatactgctacgcccatcgcagttgaggagttcgatgagcgccgcaaccgtctcgcgagggctctggtcgccgatggggcggacgcctttgtcgtggagccggggtatacgtttaaatactatgccaacgtgagccagccggaatgggaggtgtgggagccggaggaacgcccctttcttatggtggtgcagccttatcgtcactcgtcgggccatgttaccgcaaagacaaccttcctagccccatccttcgaggcggagcgagcccgactgctgaacatgccttttctcgaaccgatcgagatcattccatgggaggaacactggaacccatacgacacgctcaaaaattccgtcatcttctcggctctggatcgagcacctcgactcatggtggacgaggaaatgagggactttatccaacggggtcttggtcactccgggttcgaaatcgtcgggctgatgggagaagtggagcgagtccggcagatcaaatccggcaccgaagtgggaatcctccgcgccgtgaacacgggaactgtggaagccgtgcggcagatgcggaaatgcctgtaccccggtctaaccgaaagtgagatcgcaagtgccctggacaatacccttcgctcggctggtttggagccattttttgatattgtcttgtttgacgaaaatgccgccaacccacatggtggtaccaatggctcgaaggttctcgagccggaaacctttgttctgattgacgtaggcgcccatctccttgggtactcgtcggatatttgtcgaacattcttcccgccgttccttgagccatcgaaaccggatatacccaccccagcacgtttgcgagagaagttggaggtgtgggacattgtctttgaagctcaaacccgatccatagggcagttccaggtgaacgccagtgctgccagcgtcgacatcgctgctcgggaggtgatcacggacggcgggtatggggaagccttcacccatcgtgttggccacggaattggaatcaaagcccacgaaagcccctatttgaaccagggcaaccatgccactctcctccaagccgggatgacgttcacctcggaacctggggtgtatctggtggatcgattcggggtgcggcacgaggacatctttctggtgcgggagggtggggaagccgagctgttgaccggtcgtcgagcatatgggccttgggacccatag

SEQ ID NO: 106 - protein, 488 aa, Aspergillus niger
MLDKQTESLPLAEEIPLLRQPPHQHRKTVLRFITGAGLLLLTIYTLFPRLSPFTSIKQPLSVSPYESFERCSIENLRQTGYYFLDTATPIAVEEFDERRNRLARALVADGADAFVVEPGYTFKYYANVSQPEWEVWEPEERPFLMVVQPYRHSSGHVTAKTTFLAPSFEAERARLLNMPFLEPIEIIPWEEHWNPYDTLKNSVIFSALDRAPRLMVDEEMRDFIQRGLGHSGFEIVGLMGEVERVRQIKSGTEVGILRAVNTGTVEAVRQMRKCLYPGLTESEIASALDNTLRSAGLEPFFDIVLFDENAANPHGGTNGSKVLEPETFVLIDVGAHLLGYSSDICRTFFPPFLEPSKPDIPTPARLREKLEVWDIVFEAQTRSIGQFQVNASAASVDIAAREVITDGGYGEAFTHRVGHGIGIKAHESPYLNQGNHATLLQAGMTFTSEPGVYLVDRFGVRHEDIFLVREGGEAELLTGRRAYGPWDP

SEQ ID NO: 107 - DNA, 2845 bp, Aspergillus niger
cggtccaatagtggcccgctattggatccacggccggcttttggcggggctcttgtcgagaccgtgtatcaaagggtggccgaaaagctattggggtgtgagagacagattaatacggagtcgttgagggccaagtttaaggagaactgacatgtcggtcagtaatgggaaaatagataaaacgagttaagcgatgtctcagatggtcctgtccaagtctgtccttgtaatgagtgtggtgatggaaagataattgatgatgacgatgttgatgatgcaaaataagggcttgtccgggtctccaggctttcccctccgaccgaggaacgggtgaccgagcgatccatgtttagctggtcggtttggtgcagtagctgctgccccccccccgttgtaccgtaaatgtggtaagcgctgcttctctccggcccattggggggttcggcgtgaaggcgcctagttgttcaggccacaaccgtagctacagctttccgaatgactaagccccggccgccgtgttcttcccgcaaacacgttcgggctcggttttgaagatcgcataccagccatcgtcttcagataggctcctcttagtccaatccctcgctgccgcacccgacggcttccttttttgtttgatcacactccctagggtcttttttatctagccagtgcttcttggagtctgcgagcttgtattgccgcatttatcctaattcttttccactgtgaatgagtacggaattccatggcaactatttcccttgcgtgtgaagcgcggaattgctgaactagccttctctcaaccctgcagagccagcacagacaacgatcattctacgtgactcaaactcgatttaccttttcttcccctgcgacgggatgcgacattagcttgccgccagctacactcacgatactcgctctcaatcgtatgcgaaataggatatggttacatccactccgactctcaacaactcgtgaagtcaatccctcggctacaattggcaaccataagccatattacctctgatcatctcaatgcgaatgatgatctgtaggaagaattaagttgcttttggagattcggcaaacctcggcggcaaagactgccatttttccagcccgaaaacgtcactctttcgtgctgtgacgatatcatcattccctcaacaggtctctcttttctgaacaatcacaatgggacacatgagctacccctcccaaatggatagcccctccaggcaacttgtcctggatttagcgcgggaccttgaacagttacgcatgcacaacaccgagttgaagaaggtcaaagtctacgaacgccgatccttctatgagaaccttgaccgaattgatagcgaacttgaggcccagcacaatgcggcccttgacaaggctgccgctctgcatgatcgggtactcgtggaggccgaagagacgttgcgcgcacaccaacgagcggtagaggaggagctccgtcggagagaggaagaagcacggaaagaggcggagcgcatagaacgagagaaggcagagaagctacgccgagagcaggaggaggctgcacggcgtgaggctgagcgcagagcagccgaggaggcgaagaagaaggcagaggaagaggcggagaggaaaaagaaggcggcgcaagaagaacaggagcggaaagaacgagagcgactagaggaagagaatcgcaagcgccaggaagagacacaaaaggcagagcaggaggcgtcccaacgccaagcggaagccgcgcaaaaggcacaggcggagcgacagcgacaggtcggaggcgctcgtcttacggaggaagaaatcaaggtccaggcccgctacgtggaactgcaccaacatctcaagaagttccggcagtacttgaaaaatgaagggaaaacaaacgccattgtcaagcaaaacatgggcgatatgcggcgaacgattaagaaatgcgttggacaactacgtgaaggcaagggagccaacaaagcccaggtaagtgtcttgctgtgcttcccaagtaatagaagaaggcagcgagctaacctcgtcaactgccaaacagcttcaagagattcgcgcgacgcttgagaaagccgcctcgattgctgaaccgtcggtggatgttcgccaattcatcgctttcccgcccgagaatattgccaattccgatgacaacaaggtgcctgcccttttgatctacgccctgaacatcttctccaagtgtatgatctcttccctcattacggaggcgtccatcaacctgggccatgcggagccggtcgggatcgtcgcggcccagatattctccgccgatgccttcatctacaagggctgccacatggtggacattctattggccaagtaccgtgttgtttgcccagcgctgtggggattccatggcaatgagaagaccgagggtggccgacgtgccctgggttggtggcgcgaaggaccggacgggccgtacatcagcgaacaggcccacgccgaccgaatgacagctctgggtgcgggttatgcggccttgaccctgcgcaattttggcaaaaccgcgcgcaagaaccctttccccaacaccatgttttggtataccatgcataaaatcctgaatatcccgccggcagagatccaggatactcatgtcaccctgctttcggcaatgctgaaatcgtcagccgaaagaattgttggtttcttcgggcatatcggactggcgctgatgaggaaggctatagtcgaattacccgacagcctgccccggcagagtatgagcgttaaccaactcaagctcctcaaggatctgtataaacgggagaagaacattttgctctga

SEQ ID NO: 108 - DNA, 1575 bp, Aspergillus niger
  CDS (1)..(1575)
atgggacacatgagctacccctcccaaatggatagcccctccaggcaacttgtcctggatttagcgcgggaccttgaacagttacgcatgcacaacaccgagttgaagaaggtcaaagtctacgaacgccgatccttctatgagaaccttgaccgaattgatagcgaacttgaggcccagcacaatgcggcccttgacaaggctgccgctctgcatgatcgggtactcgtggaggccgaagagacgttgcgcgcacaccaacgagcggtagaggaggagctccgtcggagagaggaagaagcacggaaagaggcggagcgcatagaacgagagaaggcagagaagctacgccgagagcaggaggaggctgcacggcgtgaggctgagcgcagagcagccgaggaggcgaagaagaaggcagaggaagaggcggagaggaaaaagaaggcggcgcaagaagaacaggagcggaaagaacgagagcgactagaggaagagaatcgcaagcgccaggaagagacacaaaaggcagagcaggaggcgtcccaacgccaagcggaagccgcgcaaaaggcacaggcggagcgacagcgacaggtcggaggcgctcgtcttacggaggaagaaatcaaggtccaggcccgctacgtggaactgcaccaacatctcaagaagttccggcagtacttgaaaaatgaagggaaaacaaacgccattgtcaagcaaaacatgggcgatatgcggcgaacgattaagaaatgcgttggacaactacgtgaaggcaagggagccaacaaagcccagcttcaagagattcgcgcgacgcttgagaaagccgcctcgattgctgaaccgtcggtggatgttcgccaattcatcgctttcccgcccgagaatattgccaattccgatgacaacaaggtgcctgcccttttgatctacgccctgaacatcttctccaagtgtatgatctcttccctcattacggaggcgtccatcaacctgggccatgcggagccggtcgggatcgtcgcggcccagatattctccgccgatgccttcatctacaagggctgccacatggtggacattctattggccaagtaccgtgttgtttgcccagcgctgtggggattccatggcaatgagaagaccgagggtggccgacgtgccctgggttggtggcgcgaaggaccggacgggccgtacatcagcgaacaggcccacgccgaccgaatgacagctctgggtgcgggttatgcggccttgaccctgcgcaattttggcaaaaccgcgcgcaagaaccctttccccaacaccatgttttggtataccatgcataaaatcctgaatatcccgccggcagagatccaggatactcatgtcaccctgctttcggcaatgctgaaatcgtcagccgaaagaattgttggtttcttcgggcatatcggactggcgctgatgaggaaggctatagtcgaattacccgacagcctgccccggcagagtatgagcgttaaccaactcaagctcctcaaggatctgtataaacgggagaagaacattttgctctga

SEQ ID NO: 109 - protein, 524 aa, Aspergillus niger
MGHMSYPSQMDSPSRQLVLDLARDLEQLRMHNTELKKVKVYERRSFYENLDRIDSELEAQHNAALDKAAALHDRVLVEAEETLRAHQRAVEEELRRREEEARKEAERIEREKAEKLRREQEEAARREAERRAAEEAKKKAEEEAERKKKAAQEEQERKERERLEEENRKRQEETQKAEQEASQRQAEAAQKAQAERQRQVGGARLTEEEIKVQARYVELHQHLKKFRQYLKNEGKTNAIVKQNMGDMRRTIKKCVGQLREGKGANKAQLQEIRATLEKAASIAEPSVDVRQFIAFPPENIANSDDNKVPALLIYALNIFSKCMISSLITEASINLGHAEPVGIVAAQIFSADAFIYKGCHMVDILLAKYRVVCPALWGFHGNEKTEGGRRALGWWREGPDGPYISEQAHADRMTALGAGYAALTLRNFGKTARKNPFPNTMFWYTMHKILNIPPAEIQDTHVTLLSAMLKSSAERIVGFFGHIGLALMRKAIVELPDSLPRQSMSVNQLKLLKDLYKREKNILL

SEQ ID NO: 110 - DNA, 2751 bp, Aspergillus niger
tcgccctggttctacaccaatctaccccagtggagcaagaactggctctggcgcggggacgatctgtggcatatacggtgggagcaagtcatgagcttgcagccggcctttgtccaggtatggcattcctcggatgatgctgggcactgctgacaatgatttagatcatcagttggaatgattacggagaatctcactacataggaccaatctacgaatctgggatgcccgatggatcttccaagtacgtcttggattgcccgcacgatgcgtggcgggcactgctgccccactacattgccgcctaccgaggatgcagtataggcggtctgtaccaggcgaatcagaccctacctttggaggataagatggtgtactggtatcgcctgaatccgagttacgctgggagcgccaatggcacgacgggcaatgatcctggcgtgggccaggaggtgatgccaccgagtgaactcgcccaggaccgagtatttgtcagtgctactgtgaaagatgcctgtgagatgtacgttcagattggatattcggaacctacgggaattcaggcgtcgggtccgggaattcatcacttttttgtgccgttcaatgggcaaacggggccggtgcgaatagtgatggtccggaatggctatgaggttgccgttgcggttggaccggcaatcacggatgattgcaaggatggcaatgtcaactggaacgcctatgtgggaacgagcgactaggaggagtgtatgggactacagtagaaagatggagagataggagataaatagtggttcatcctcggctcgggccaagtgggacgcagcttatcagtgacgcagctcccgatcaacctggctggtacatagaccctgggagctatgcacgccctcgtatattactgtgaatcttgagcaattgctgttgtgactattccagttaatttcaatgaccataggttccttcttgtttacaatgaagcccactttttgccctcgcccgacggagctccgggcctcagcaacaaaactggtcacggcgcttatcggaatgatcagcgaagctccgctcagctgacctcgtcccttctccgctcttctccaattccctccctctcctcgtcctcctcctcctcctcaattgaccacttgactattccactacttcatcaaccacctctactaccttctatacagctccatggccaagaagaacatcatgggcctccgtgaggctgccatggcctatcgtcccagctcgtccggccacctccccgacccggtccaggactactccccagtctctcctgctcccaccgcgcaacctacggcggaaccgggctccgttaacccagatgactatgcgaaaccatactgcgaattcatgactgcgaatccgaccatcttccatgctgttgacggcttcaccaagcagctggaaagcaaaggatacaagcgcctgcccgagcgcgaagcgtggacctccaagctcgaacgcggcgggaaatactattgcactcggaactccagcgcgtttatcgcgttttccattggcaaggattaccagagtgggaacggtatggccatcgtggccggtcacatcgacgccctcaccgccaagttgaagcctgtgtccaagctccccacgaaggccggctttctgcagctcggggttgctccatatgctggtgctctgaacgagacctggtgggatcgggatctgtctattggtggccgtgtcttggtccgggaccctagcagcggaaaggtcgagtccaagttggtcaagctggactggccgatcgcccgtattcccaccttggcaccgcacttcggcgcgccatcccagggccccttcaataaggagacacagatggtccccgttattggtgtggataactccgatctcttccagcagcaaacgtcatccaccactagcccgtttgcagcaggctcatttgcctctacgcagccggagaagctcgtcaaggtgatctccaaggaattgggaattacggactacaacaccattctcaactgggagctggaactctatgacagtcagccagcgcagctgggtggtctggagaaggacctgatctttgcgggacggattgacgataagctgtgctgctacgcggctcaggaggctctgatcgcctcgccggacagcacgtccccggggtcagtgaagatggtcggcatgtttgatgacgaggagattggcagtttgctccgccagggtgctcggtccaactttatgagcagcgtgatggagcgcatcgccgaggccttcgccccgagctatggtcccaacgtgctggcgcagaccgtggccaacagcttcttcgtctcttcggacgtcatccatgccgtcaaccccaacttcctcaacgtgtacctggagaaccacgcaccgcggctgaacgttggcgtgtccgtatccgccgactcgaacgggcacatgacgactgacagtgtgagtcatgctttcatgaagcgtgttgctgagcgctgcggttcgaccctgcaggtcttccagatccgcaatgattcccgcagcggcggcacgatcggacccatgaccagctcccggattggcatgcgggcgatcgatgtgggcattccccagctcagtatgcatagtatccgtgcgacgacgggcagtcgggaccctggtttgggagtgcagctgttcaaggggttctttgattactttgaggagattgacaaggagtttgctgacttttag

SEQ ID NO: 111 - DNA, 1551 bp, Aspergillus niger
  CDS (1)..(1551)
atggccaagaagaacatcatgggcctccgtgaggctgccatggcctatcgtcccagctcgtccggccacctccccgacccggtccaggactactccccagtctctcctgctcccaccgcgcaacctacggcggaaccgggctccgttaacccagatgactatgcgaaaccatactgcgaattcatgactgcgaatccgaccatcttccatgctgttgacggcttcaccaagcagctggaaagcaaaggatacaagcgcctgcccgagcgcgaagcgtggacctccaagctcgaacgcggcgggaaatactattgcactcggaactccagcgcgtttatcgcgttttccattggcaaggattaccagagtgggaacggtatggccatcgtggccggtcacatcgacgccctcaccgccaagttgaagcctgtgtccaagctccccacgaaggccggctttctgcagctcggggttgctccatatgctggtgctctgaacgagacctggtgggatcgggatctgtctattggtggccgtgtcttggtccgggaccctagcagcggaaaggtcgagtccaagttggtcaagctggactggccgatcgcccgtattcccaccttggcaccgcacttcggcgcgccatcccagggccccttcaataaggagacacagatggtccccgttattggtgtggataactccgatctcttccagcagcaaacgtcatccaccactagcccgtttgcagcaggctcatttgcctctacgcagccggagaagctcgtcaaggtgatctccaaggaattgggaattacggactacaacaccattctcaactgggagctggaactctatgacagtcagccagcgcagctgggtggtctggagaaggacctgatctttgcgggacggattgacgataagctgtgctgctacgcggctcaggaggctctgatcgcctcgccggacagcacgtccccggggtcagtgaagatggtcggcatgtttgatgacgaggagattggcagtttgctccgccagggtgctcggtccaactttatgagcagcgtgatggagcgcatcgccgaggccttcgccccgagctatggtcccaacgtgctggcgcagaccgtggccaacagcttcttcgtctcttcggacgtcatccatgccgtcaaccccaacttcctcaacgtgtacctggagaaccacgcaccgcggctgaacgttggcgtgtccgtatccgccgactcgaacgggcacatgacgactgacagtgtgagtcatgctttcatgaagcgtgttgctgagcgctgcggttcgaccctgcaggtcttccagatccgcaatgattcccgcagcggcggcacgatcggacccatgaccagctcccggattggcatgcgggcgatcgatgtgggcattccccagctcagtatgcatagtatccgtgcgacgacgggcagtcgggaccctggtttgggagtgcagctgttcaaggggttctttgattactttgaggagattgacaaggagtttgctgacttttag

SEQ ID NO: 112 - protein, 516 aa, Aspergillus niger
MAKKNIMGLREAAMAYRPSSSGHLPDPVQDYSPVSPAPTAQPTAEPGSVNPDDYAKPYCEFMTANPTIFHAVDGFTKQLESKGYKRLPEREAWTSKLERGGKYYCTRNSSAFIAFSIGKDYQSGNGMAIVAGHIDALTAKLKPVSKLPTKAGFLQLGVAPYAGALNETWWDRDLSIGGRVLVRDPSSGKVESKLVKLDWPIARIPTLAPHFGAPSQGPFNKETQMVPVIGVDNSDLFQQQTSSTTSPFAAGSFASTQPEKLVKVISKELGITDYNTILNWELELYDSQPAQLGGLEKDLIFAGRIDDKLCCYAAQEALIASPDSTSPGSVKMVGMFDDEEIGSLLRQGARSNFMSSVMERIAEAFAPSYGPNVLAQTVANSFFVSSDVIHAVNPNFLNVYLENHAPRLNVGVSVSADSNGHMTTDSVSHAFMKRVAERCGSTLQVFQIRNDSRSGGTIGPMTSSRIGMRAIDVGIPQLSMHSIRATTGSRDPGLGVQLFKGFFDYFEEIDKEFADF

SEQ ID NO: 113 - DNA, 2501 bp, Aspergillus niger
tcctggtaagttctctcttcatcttgagctttctctacaatgcggggtaaagcgactactgttatgatggcatatgtctaactccctccgcagttcagcgcctccatgtggtccgccgagcaggccaacgagatccactccattgcccgttcgatcaagcccgacatcaagctgcacgctatccccgagggtctccaggtcgagcgcggccccgacgccattgttgaatacctttgcgagaaggtccctcctctcctggacgcctaaatatgaggtgtcagtgtaccaactttaggaataagcgggggatatcacggtggatatgacgacaatatctatgtcctgtatatacatttacttcaatgaagctcccagaatagacgatttacgattttgattgttgaatgtataaaaggagatttacagtagagtgtgtattctgacatggcaagtatatttgtagaacaaccgagctccctcataaaaatcagtggacttgagctagattggtgcgacgtgggagtaacagccaagctggcccttgcggtgtagaaaaatgtacttccaataaatattgttctgactgaataaccatgttggcggcgatgttcatctcagtttgcagatagtaattaattcacccggatttagtttcccggctgttttcgagtcgtacgatcattcagaggcctaagcgtaagtagatagtaagctgttacagcgagagattccgatcaatatccgaggtggaaggtccaacatgaaccgggtggattggtagtactatcagtagtactagaaacgatgatgcaattaatcgatatatattttgaaccgagatcagataagatccaattactcaagcccctacaaaccattaccacaatagcccaccatcaatgcaaggccagcagtacaacgcagcacaaaccaaaggctacctttcagaccaaagcaaacgacaattcacctccgacatatatacccctgtcaagccaagacacccggatattgctccaagcatgacaatcccattaagccgacgggacaacggcaaaaccacttgccagctgcttagtcatatacccaaggcagctgctgatcttcaatgcttaaatgcaccaaactcaaggtaaaccctcagatcaatcgcattctcagatagcatcgtcatcactatcataatcgccactcacaatcatgctccaaccaatccgtacaaccttccgaagcgctgcccaaagcgcccgcttattctccacatcacgaggcctccgaacagacctgtcctaccaggtgtttggccccgagaaaggcgatctggttgatcggagtcctatcatcttccttcatgggctgtttggctcgaagcagaataaccggggtattagcaagtatgcatcccttttccattcaattgccctcagaagacaaacacccagtgaattggaaagcgactaaccatcatgcagagcattggcacgtgatctgaaacgtgagatcttcacagtggtgtgtaactagtgatgaagaaaaagaatttggaatcaaagtagtgattcaaatcgtgtttgttctccaggacctccgcaaccatggccaatccttccacgcccaagaacacaactactccgtcatggccgaagacgtgatcaagttcctccagcagctgaagctagacaaggcggttctgatcggccactcgatgtacgtcatatcctactactatgtacatgtctctgattcttccctctacacacaataccttcagaaccaacagtaaagacaaaacatgattaaggcggctaaactaacggaaaataattaggggcgctaaaaccgccatgacagttgcccttgattcacccaagcttgtctcggcccttgtaccggttgacaacgcccccgtgaatgctcccctgaagagcgatttcggtctctacgtccgtggcatgcagcatgttgaggctgcgaatgtgacgaagcagtctgaggctgatgagatcttgaagggatatgaggaggtgagtacgagttgtgaattgcaaaccgagctcgatctgtacatatcgatcgactaagctaatatgtgacagtccctccccatccgccagttcctcctcaccaacctggtccgctcgactgaagaccaaaccatgaagttccgtgtcccgctcgccgtcctcggcgaagccattcccggtatggctgatttcccataccgggagccgggatctgtctcgtatgatggccctacgctgtttgtgaggggcaccaagagcagatatgtgagcgatgagtctgtgccaacgattaagaagttcttccccaatgctcgcatagcggatgtggaggccgggcattggttgatttcagagaaccctgagggatttaggcaaggtgagcagttctgatctatttggattgagtaggatggtttgctgacgcgtatgcttttgcttcttgcagctgttctaaagttcctccaggaggctccctga

SEQ ID NO: 114 - DNA, 891 bp, Aspergillus niger
  CDS (1)..(891)
atgctccaaccaatccgtacaaccttccgaagcgctgcccaaagcgcccgcttattctccacatcacgaggcctccgaacagacctgtcctaccaggtgtttggccccgagaaaggcgatctggttgatcggagtcctatcatcttccttcatgggctgtttggctcgaagcagaataaccggggtattagcaaagcattggcacgtgatctgaaacgtgagatcttcacagtggacctccgcaaccatggccaatccttccacgcccaagaacacaactactccgtcatggccgaagacgtgatcaagttcctccagcagctgaagctagacaaggcggttctgatcggccactcgatgggcgctaaaaccgccatgacagttgcccttgattcacccaagcttgtctcggcccttgtaccggttgacaacgcccccgtgaatgctcccctgaagagcgatttcggtctctacgtccgtggcatgcagcatgttgaggctgcgaatgtgacgaagcagtctgaggctgatgagatcttgaagggatatgaggagtccctccccatccgccagttcctcctcaccaacctggtccgctcgactgaagaccaaaccatgaagttccgtgtcccgctcgccgtcctcggcgaagccattcccggtatggctgatttcccataccgggagccgggatctgtctcgtatgatggccctacgctgtttgtgaggggcaccaagagcagatatgtgagcgatgagtctgtgccaacgattaagaagttcttccccaatgctcgcatagcggatgtggaggccgggcattggttgatttcagagaaccctgagggatttaggcaagctgttctaaagttcctccaggaggctccctga

SEQ ID NO: 115 - protein, 296 aa, Aspergillus niger
MLQPIRTTFRSAAQSARLFSTSRGLRTDLSYQVFGPEKGDLVDRSPIIFLHGLFGSKQNNRGISKALARDLKREIFTVDLRNHGQSFHAQEHNYSVMAEDVIKFLQQLKLDKAVLIGHSMGAKTAMTVALDSPKLVSALVPVDNAPVNAPLKSDFGLYVRGMQHVEAANVTKQSEADEILKGYEESLPIRQFLLTNLVRSTEDQTMKFRVPLAVLGEAIPGMADFPYREPGSVSYDGPTLFVRGTKSRYVSDESVPTIKKFFPNARIADVEAGHWLISENPEGFRQAVLKFLQEAP

SEQ ID NO: 116 - DNA, 2643 bp, Aspergillus niger
agcgcattcccatccgcgtggttcgcatgatggctgagacaaataaagttggaggccgaaggcggaaggcaggctgaagagacactcccccaaaacaatggaacggcgggaatcatttccaggggccaaacaaacagcggatgatcttttcatttttcttgtgatgtccgacccgacggaattgtgggtaatatcactgaaaatgcacctcaatagcatactaagcgacgacagtccctcgccactgttcaagtgagccataggagagaattgtcagaaggtaaacgttcgagaattttactcgatgtttttgcgaggaaaagctcaatctcattccgagacctgccattcctggaaggtcaggcacattcagtgacctttctagcttctctggaagaaagctcactgtcacagttcgatgcagcatcgatgctcgagaacaattgagcggtaacagctatttccactattgaggaaggacattcctattgtatacaattggtatgtatagccgcatcacaagcgacaccgatcctactagtaccatggtcagtgtttgttataatgattctgtatgtgtgttggcttacgtgacgtacaccgcttcatcatgcgcagacatgcgatggcttgaaatgccgagatggttggtgggcgtcagagcatccgatacatttagctccgacagacaggatattacccaagcaaggtagcttgttacagaagagaaccgcaatgaagcacgcggtagaaaggcctagcagttgagcagatcgatcgcctgcttgttcacgactgttttcaggccattgcaagcctcatcagccgattcgactcgtcaccacgtagggagaatcatgagtcagctactcagcaccataagcgcttaatggcaactgagcgctaatcacactcagctctgcataggggagagaatagggattaaaccttacgccgtctcaggcgggataatgtggcttaggcctcgacacccgagttggtctagcttaccggctaaaatctcacatactatcaactgataacgatagcaaaggcaggattgtgatggccccgacggactccgggatatgacaaacacctgctgacagccatttgtcccaacccctctggggttgatatttggcagcttccccagtttttctgctcctattgacgaaggcccttgttacattcatcatcatggtccgccgaattgcttcagctacacctatggtgcaatcgcccatgtcgccattgggcacaacatactgcgtccgtcctaatcctgtttcactgaatcttcaaagaagacctctcgtgatcgcatcaacagacgaggccaaggtcactataatatatgccggactattaatccctggcgacggagaacctctgcgcaatgctgccctagtcatcagcgataagatcatcgcgttcgttggatccgaagccgacatccctaagaaatacctccggtccacgcagtctactcatcgtgtccccgtgctcatgcctggtttgtgggattgccacatgcattttggcggggatgacgattattacaacgattatacatctggtctggccactcatccagcatcatcaggtgctcgactagcccgtggttgctgggaagcattgcagaatgggtatacatcctaccgcgacctagccggatacgggtgcgaggtcgcaaaggcgatcaatgatggcactatcgttggtccaaacgtgtactcgtctggcgctgcactcagtcagacagctggacacggcgatatcttcgctcttccagcaggcgaagtactggggagttatggagtaatgaacccacgccctgggtactggggggcagggccgctatgtatcgccgatggcgtagaggaggtccgacgagcagtgaggttgcagatccgtcgcggtgcaaaggttatcaaagtgatggcctctgggggtgtcatgtcgcgagacgataatcccaactttgcacagttctctccagaagaactgaaggtgatagtggaagaggcggctcgacagaaccggatcgtttctgcacatgtgcatggcaaggcggggattatggctgctatcaaagcaggctgcaagagtctggagcatgtgtcttatgctgacgaggaggtctgggagctcatgaaagagaagggaattttgtatgtggccacacgctcggttattgaaatctttctggctagtaatggagaggggttggtgaaagagtcgtgggccaagttgcaggcccttgccgattcgcatttgaaagcttatcagggagctattaaggcgggtgttaccattgcgttgggaacggataccgcccccggtggtcctaccgcacttgagttgcagtttgccgtcgagagaggaggtatgacgccgttggaggccatcaaagccgcaactgcgaacgctcccctgtcagttggtccacaagcaccgttgacgggtcagcttcgcgaggggtatgaggcagatgtgattgcgttggaggagaatccattggaggacatcaaagtctttcaggagccgaaggcagttacccacgtctggaagggagggaaactgttcaaaggtccaggtattggtccgtggggagaagatgcacgtaatccttttctgtag

SEQ ID NO: 117 - DNA, 1443 bp, Aspergillus niger
  CDS (1)..(1443)
atggtccgccgaattgcttcagctacacctatggtgcaatcgcccatgtcgccattgggcacaacatactgcgtccgtcctaatcctgtttcactgaatcttcaaagaagacctctcgtgatcgcatcaacagacgaggccaaggtcactataatatatgccggactattaatccctggcgacggagaacctctgcgcaatgctgccctagtcatcagcgataagatcatcgcgttcgttggatccgaagccgacatccctaagaaatacctccggtccacgcagtctactcatcgtgtccccgtgctcatgcctggtttgtgggattgccacatgcattttggcggggatgacgattattacaacgattatacatctggtctggccactcatccagcatcatcaggtgctcgactagcccgtggttgctgggaagcattgcagaatgggtatacatcctaccgcgacctagccggatacgggtgcgaggtcgcaaaggcgatcaatgatggcactatcgttggtccaaacgtgtactcgtctggcgctgcactcagtcagacagctggacacggcgatatcttcgctcttccagcaggcgaagtactggggagttatggagtaatgaacccacgccctgggtactggggggcagggccgctatgtatcgccgatggcgtagaggaggtccgacgagcagtgaggttgcagatccgtcgcggtgcaaaggttatcaaagtgatggcctctgggggtgtcatgtcgcgagacgataatcccaactttgcacagttctctccagaagaactgaaggtgatagtggaagaggcggctcgacagaaccggatcgtttctgcacatgtgcatggcaaggcggggattatggctgctatcaaagcaggctgcaagagtctggagcatgtgtcttatgctgacgaggaggtctgggagctcatgaaagagaagggaattttgtatgtggccacacgctcggttattgaaatctttctggctagtaatggagaggggttggtgaaagagtcgtgggccaagttgcaggcccttgccgattcgcatttgaaagcttatcagggagctattaaggcgggtgttaccattgcgttgggaacggataccgcccccggtggtcctaccgcacttgagttgcagtttgccgtcgagagaggaggtatgacgccgttggaggccatcaaagccgcaactgcgaacgctcccctgtcagttggtccacaagcaccgttgacgggtcagcttcgcgaggggtatgaggcagatgtgattgcgttggaggagaatccattggaggacatcaaagtctttcaggagccgaaggcagttacccacgtctggaagggagggaaactgttcaaaggtccaggtattggtccgtggggagaagatgcacgtaatccttttctgtag

SEQ ID NO: 118 - protein, 480 aa, Aspergillus niger
MVRRIASATPMVQSPMSPLGTTYCVRPNPVSLNLQRRPLVIASTDEAKVTIIYAGLLIPGDGEPLRNAALVISDKIIAFVGSEADIPKKYLRSTQSTHRVPVLMPGLWDCHMHFGGDDDYYNDYTSGLATHPASSGARLARGCWEALQNGYTSYRDLAGYGCEVAKAINDGTIVGPNVYSSGAALSQTAGHGDIFALPAGEVLGSYGVMNPRPGYWGAGPLCIADGVEEVRRAVRLQIRRGAKVIKVMASGGVMSRDDNPNFAQFSPEELKVIVEEAARQNRIVSAHVHGKAGIMAAIKAGCKSLEHVSYADEEVWELMKEKGILYVATRSVIEIFLASNGEGLVKESWAKLQALADSHLKAYQGAIKAGVTIALGTDTAPGGPTALELQFAVERGGMTPLEAIKAATANAPLSVGPQAPLTGQLREGYEADVIALEENPLEDIKVFQEPKAVTHVWKGGKLFKGPGIGPWGEDARNPFL

SEQ ID NO: 119 - DNA, 2796 bp, Aspergillus niger
tcgaggatttcgtagtaggttggttcgcgcgccgaggagtagggtttgggggatgatgaggtgaatgtgcggtatagtggtttggtatagggtgtggtggtggtcttggtggtgatggtggtgtgtcggaggcgggtggccgtgggccgtagacgtgggagggtcatgattctttttgacggttattttgtgttggtttctttgggaatgatgtgttacatttaggtagagggtgaaattaaggggaaatggagggtgcgattgaatggagggagagttgttggaggtgcgactttatcgggataagatgagaggaaggaaatccgccgctcttcggtaaggcggactgcgtcatcggtcggggtttatctgatctgatctggtggtggacctctgcttctgagtacttcgtaggatatactttgtactacgttgtatggtgttatgcttgggtgtagattgtgtatcttgatctcggaataatgatgagatgatctatatagtggttttatcatttaatttcttttctttcttgttctggtagtttattggactggtgtgcatgtatcgacattggttcattaatggtggttttggacatcattgtatgaatgtactgcttagcccatctcactagtccattgggtatttcgtatgcatatttctctttcttattatcttatacatttgaatggtccagttaggcaggttcctgcaggcttcatggtgcacgcgaccatgtgcaatgttagcgcacactgatacaacctatacatataggtctcctttcataactggtttatagtgattagtactttgaaggcactcgatcaggagctgcaagttgtacctgtacctgaagcttctccacactacatcgaattagacaatcagcatgggctaagatactaaccagttggcgccgcggatccctgaaagcagccaaagtcaacctcaggcttggcattgaccgtcttttccccgacggttgccgcttgccctcatttttctttcccctccatcagcccaccaccaacccaccccggtttgccagcttttcaacatggctgcccaggctagcgagaagctgcagaagctcgaccgtaagtcactgaacgatcccgttgctgatctccgaaccctcctttgccatccgcttgcagtaagctgataagatttccccgctcgctctctagtcaacggtcaaagcggcgacgcggaggcggacgctcctgccgctggtcaaacacaagccggagaggcggaggacgactccgatgacgatgaagtagaggatggaaatgctgccggcgagggtgcagccagcggaggtgcgctttctccacggatacctacccctcgggcaaattccagaattctccccgcactgaccaaatccgcggattttcagccgccaagaaaaagaagaagcgcaagtccaagaagaagaagaagggtggcgccaaggtccaatcctctcctccgcgcgttcccctgtcgactctgttcgccggaaaggaataccccgagggtgagatcgtcgagtaccagaatgagaattcgtaccgcaccaccaacgaggagaagcgctacctcgaccgcatgaagaatgacttcctgcaggagtaccgtcaggctgctgaggtgcaccgtcaggttcgtcagtatgcgcagaagaccattaagcctggtcagaccctcaccgagatcgcggagggcattgaagaatccgtccgtgccttgactggtcaccagggtcttgaggaaggtgataacctcaagggtggtatgggtttcccctgtggtctcagcattaaccactgcgctgcccactacacccccaacgctggcaacaagatggtgttgcagcagggtgatgtcatgaaggtcgatttcggtgcccacatcaacggccgcatcgttgacagtgctttcaccgtggcttttgacccggtgtatgaccctctcttggcggccgtcaaggatgctaccaacactggtatccgcgtatgttctacctttctgtcctaatactgggtttctggttactaacagctgcatgtaggaagcgggtattgacgtccgcatgagcgacattggtgccgctatccaggaagccatggagagttacgaagttgaaatcaacgggactatgtatcccgtcaagtgtatccggaacctcaacggtcacaacattgaccagcacattatccatggtggcaagagcgttccgattgtcaagggtggcgatcagaccaagatggaggagggtgaagtgtttgccattgagaccttcggcagtaccggaaagggctacgtgagagaggatgtaagttgttgacatcgattggccaatatgttcaatttgctaattgtgatatgaagatggaaacctctcactacgctttgatccctgatcacagccaggtccccctgcgtctctcttcggcgaagaacttgttgaacgtcatcaacaagaacttcggtactcttcccttctgtcgccgttacctcgaccggttgggccaggacaagtacctccttggggtgagtggagcctctgcgtcgtaaagtgtcaatgctaatcagcttgtgcagttgaacaacctggtttcgtccggaattgtccaggactacccgcctctttgcgatatcaagggctcctacactgcccagtatgaacatgtaggttatctcacaatctcaatctccatggccacgcagctaaccagatgacagacgattgtccttcgacccaatgtaaaggaagtcatcagtcgcggcgacgactactaa

SEQ ID NO: 120 - DNA, 1296 bp, Aspergillus niger
  CDS (1)..(1296)
atggctgcccaggctagcgagaagctgcagaagctcgacctcaacggtcaaagcggcgacgcggaggcggacgctcctgccgctggtcaaacacaagccggagaggcggaggacgactccgatgacgatgaagtagaggatggaaatgctgccggcgagggtgcagccagcggaggtggcgccaaggtccaatcctctcctccgcgcgttcccctgtcgactctgttcgccggaaaggaataccccgagggtgagatcgtcgagtaccagaatgagaattcgtaccgcaccaccaacgaggagaagcgctacctcgaccgcatgaagaatgacttcctgcaggagtaccgtcaggctgctgaggtgcaccgtcaggttcgtcagtatgcgcagaagaccattaagcctggtcagaccctcaccgagatcgcggagggcattgaagaatccgtccgtgccttgactggtcaccagggtcttgaggaaggtgataacctcaagggtggtatgggtttcccctgtggtctcagcattaaccactgcgctgcccactacacccccaacgctggcaacaagatggtgttgcagcagggtgatgtcatgaaggtcgatttcggtgcccacatcaacggccgcatcgttgacagtgctttcaccgtggcttttgacccggtgtatgaccctctcttggcggccgtcaaggatgctaccaacactggtatccgcgaagcgggtattgacgtccgcatgagcgacattggtgccgctatccaggaagccatggagagttacgaagttgaaatcaacgggactatgtatcccgtcaagtgtatccggaacctcaacggtcacaacattgaccagcacattatccatggtggcaagagcgttccgattgtcaagggtggcgatcagaccaagatggaggagggtgaagtgtttgccattgagaccttcggcagtaccggaaagggctacgtgagagaggatatggaaacctctcactacgctttgatccctgatcacagccaggtccccctgcgtctctcttcggcgaagaacttgttgaacgtcatcaacaagaacttcggtactcttcccttctgtcgccgttacctcgaccggttgggccaggacaagtacctccttgggttgaacaacctggtttcgtccggaattgtccaggactacccgcctctttgcgatatcaagggctcctacactgcccagtatgaacatacgattgtccttcgacccaatgtaaaggaagtcatcagtcgcggcgacgactactaa

SEQ ID NO: 121 - protein, 431 aa, Aspergillus niger
MAAQASEKLQKLDLNGQSGDAEADAPAAGQTQAGEAEDDSDDDEVEDGNAAGEGAASGGGAKVQSSPPRVPLSTLFAGKEYPEGEIVEYQNENSYRTTNEEKRYLDRMKNDFLQEYRQAAEVHRQVRQYAQKTIKPGQTLTEIAEGIEESVRALTGHQGLEEGDNLKGGMGFPCGLSINHCAAHYTPNAGNKMVLQQGDVMKVDFGAHINGRIVDSAFTVAFDPVYDPLLAAVKDATNTGIREAGIDVRMSDIGAAIQEAMESYEVEINGTMYPVKCIRNLNGHNIDQHIIHGGKSVPIVKGGDQTKMEEGEVFAIETFGSTGKGYVREDMETSHYALIPDHSQVPLRLSSAKNLLNVINKNFGTLPFCRRYLDRLGQDKYLLGLNNLVSSGIVQDYPPLCDIKGSYTAQYEHTIVLRPNVKEVISRGDDY

SEQ ID NO: 122 - DNA, 2968 bp, Aspergillus niger
tcttcgcgcgggcggagaaagagcgcgtaggcaaagtaggcgatccaggcggcaagcaagagaaggaaaaacgtattttgtcggcggcgttcccgaagagcgaggtactgagctcgcagggagctctcgagaatgaggagattgaggtatatctggggtggggaagaggggagggtcgacagtggatcgggggttgacgaccgtggcggggaagagggatcgctagagggaggatgggagtgaaatgcaggcgccaatgattcggaggaggatgtcgcagaagatgcaaggcgactgttgggtgctggagatcccttaaccagttggtctaggcttgctgaagccatggtgagctttggagtggaagccagagaagaagaaaggcgaggcagggagatcgggttcgtctggacggaaaagaatagagggagcaagaattaacctcggaggttcaaatcgcaggtgaaattcaaaaacacagtggtagattttggcctttgcggcccggcgttatctcatcgcatggaaagagaagaggttttgaggaagatagagaggcatggagagagagggagacggagagggagaagaagagacaagaaagagtgaagcatcgtcatccattccatcggccaacacttggttgaggctccacttccgctggactttcagcttttctcaactttcatctctcccccccgttcaatcctctgcctctcttttccaagtatatactgtttttgacagtcagggtcttcaattgtgcaggttaggaactgaacattcttttctgaggtttttctggtcctcaccttcagcgtcatcaacattggttgcctgttgcttaactccatctcggatcggggttaacggtctttggcgttgcctcaaccgtttctcattttgttccactgacctgtttcttactctttccactgcgcccccctaagagagaatttaatctatttccccttcgctgtcttttaaatactcccttcttttccgttgcagccgagagagtgacagggctcttccctctgtcactccgattttcctaacgacaaggtgtcgaccgcgcgactcccttcgctttcttttcaggtcccagtctcacgttcctggacctcgttcgaaagcgctcgatatatttcctcttcttcccgaccgacggattctagacgctcgtcgtctacatctacgatggcatccgagtcgttcaactcgcccagcggcgaatttcggggccgcagccaggaacccgtggcttctcgccgagagagtacgccacacgcagctcgcggagccagcgcaactcctgcccccttggcctggtttcccctaggctacagggaaggcttcagtcaatgggtacgtttctttactgaggaacaaagtcaagtgtcgcatgggtgactgagactgggttttcttccagtgggcgtctttacccgccgccacagccgaacacagggttctttcccacctcccttacctccagcatcaacccccaacccatctacaaaccggtaaaacgagcagtgtctctggcgggacgggcagtctccagtccgccgatcaaacgcaacagggtgaggtatcagccagttctaccaatgatccatacggcccccgaatgtggcgctccagtatggtggagctgagcgggaagaatcgggctctgaacgagttctctgtcgagcggattggtgaagaagcagatcaacatctggtcatgcttcatggatacggtgctggtttggggttcttctataagaatttcgagcctcttagtcgcctgaaagggtggcaactccatgcgctggacctcctgggcatgggccgcagtacgcgaccaccctttcgtatcaaagcgaaggagcgtgaggaggccatcaaagaagcagaagcctggttcgtggatgcgctggaagagtggcgtgtcaagcgcaacatcgaccgtttcacactacttggccatagtttgggaggctacatggccgtggcatacgctctcaaatatccgggacgactcaacaagcttatccttgcttcccccgtcggaatcccagaggacccgtacgctgtgcgggcagagatgcctgcgccaaacgagtcgaccatggcgaatgagctcactcagaaccagcgcaatatcgccgaatctgcatcttcggttcccccaactgagcttcagaaaggcgataacaatattttgctaaagggttcccctacagatagtggcgcttcccaagatcggccgccccggcgcatggttcccaagtggttcgcctatctttgggatgccaacatctcccccttcagcctggtgcgatgggcgggaccactcggtccgcgtctggtctccgggtggacatcccggcgtttctcccatcttccggcagaggaggccaaatctctgcatgactattcgtattcgatcttcagcatgcgcggcagcggcgagtatgctctatcgtacattctcgccccgggcgcattcgcccgcagtccgctaatccgacgcatcgagggcgtcggtcgtcaattcatccagcaaaatccgtcacccgcatctgctgtcctcgagtctgcgaaagccgcagctgtagctaccacatcccaatctactcttgaatcttcctcggccaactcggccccctctcagaccccctcaacgacacccaagcgcgagaacggtctccccataatcttcatgtacggtgaccacgattggatggacgtgaagggcgggctagccgcaaaggctaagttggatcaagagaaggagcgtatcttgcaaaacgcaacagtggaggaacgcgaagcggacaatggctcagctaaggtggtcattatcaagaggtccggccatcatatctatctagacggatgggaagacttcaaccgcatcgttttggctgagatggaggaggtggctcagaaggagagagctaatcgcgcctcatag

SEQ ID NO: 123 - DNA, 1542 bp, Aspergillus niger
  CDS (1)..(1542)
atggcatccgagtcgttcaactcgcccagcggcgaatttcggggccgcagccaggaacccgtggcttctcgccgagagagtacgccacacgcagctcgcggagccagcgcaactcctgcccccttggcctggtttcccctaggctacagggaaggcttcagtcaatggtgggcgtctttacccgccgccacagccgaacacagggttctttcccacctcccttacctccagcatcaacccccaacccatctacaaaccggtaaaacgagcagtgtctctggcgggacgggcagtctccagtccgccgatcaaacgcaacagggtgaggtatcagccagttctaccaatgatccatacggcccccgaatgtggcgctccagtatggtggagctgagcgggaagaatcgggctctgaacgagttctctgtcgagcggattggtgaagaagcagatcaacatctggtcatgcttcatggatacggtgctggtttggggttcttctataagaatttcgagcctcttagtcgcctgaaagggtggcaactccatgcgctggacctcctgggcatgggccgcagtacgcgaccaccctttcgtatcaaagcgaaggagcgtgaggaggccatcaaagaagcagaagcctggttcgtggatgcgctggaagagtggcgtgtcaagcgcaacatcgaccgtttcacactacttggccatagtttgggaggctacatggccgtggcatacgctctcaaatatccgggacgactcaacaagcttatccttgcttcccccgtcggaatcccagaggacccgtacgctgtgcgggcagagatgcctgcgccaaacgagtcgaccatggcgaatgagctcactcagaaccagcgcaatatcgccgaatctgcatcttcggttcccccaactgagcttcagaaaggcgataacaatattttgctaaagggttcccctacagatagtggcgcttcccaagatcggccgccccggcgcatggttcccaagtggttcgcctatctttgggatgccaacatctcccccttcagcctggtgcgatgggcgggaccactcggtccgcgtctggtctccgggtggacatcccggcgtttctcccatcttccggcagaggaggccaaatctctgcatgactattcgtattcgatcttcagcatgcgcggcagcggcgagtatgctctatcgtacattctcgccccgggcgcattcgcccgcagtccgctaatccgacgcatcgagggcaacggtctccccataatcttcatgtacggtgaccacgattggatggacgtgaagggcgggctagccgcaaaggctaagttggatcaagagaaggagcgtatcttgcaaaacgcaacagtggaggaacgcgaagcggacaatggctcagctaaggtggtcattatcaagaggtccggccatcatatctatctagacggatgggaagacttcaaccgcatcgttttggctgagatggaggaggtggctcagaaggagagagctaatcgcgcctcatag

SEQ ID NO: 124 - protein, 513 aa, Aspergillus niger
MASESFNSPSGEFRGRSQEPVASRRESTPHAARGASATPAPLAWFPLGYREGFSQWWASLPAATAEHRVLSHLPYLQHQPPTHLQTGKTSSVSGGTGSLQSADQTQQGEVSASSTNDPYGPRMWRSSMVELSGKNRALNEFSVERIGEEADQHLVMLHGYGAGLGFFYKNFEPLSRLKGWQLHALDLLGMGRSTRPPFRIKAKEREEAIKEAEAWFVDALEEWRVKRNIDRFTLLGHSLGGYMAVAYALKYPGRLNKLILASPVGIPEDPYAVRAEMPAPNESTMANELTQNQRNIAESASSVPPTELQKGDNNILLKGSPTDSGASQDRPPRRMVPKWFAYLWDANISPFSLVRWAGPLGPRLVSGWTSRRFSHLPAEEAKSLHDYSYSIFSMRGSGEYALSYILAPGAFARSPLIRRIEGNGLPIIFMYGDHDWMDVKGGLAAKAKLDQEKERILQNATVEEREADNGSAKVVIIKRSGHHIYLDGWEDFNRIVLAEMEEVAQKERANRAS

SEQ ID NO: 125 - DNA, 3175 bp, Aspergillus niger
cgctatgtcaagggcgatgatggcgagccaatcatgcccaaggtacgtcatggaagggagaactactcaccacagagtcatcatgtctcatctcacgatatcactgacatatctcagggcatggtggacttgattaaaaaggacgcggatcagggcatcgatgatcttgtttaatccggtataccagcgacggaagtagcttgtccgaaaataaatctctgtacaggatagttaaagaggaaatataataagaagctatgagccctagacccgctagatgaagaagggccaagtcatggacatgaaggactgaccggagtcgggcgaactcttggctatcattacccgcgagagctacatcacggatagcttcggaaaagaaaagcaagatccattgccacgaggacattgtggcgttctgcttggccgattcaaaatgcatgagagacacacagtcaaagaagccatagaaccagatactccgacgggattcgagtctttctatagaagcaacctatagagcccccaaataggcaacgatgggctgggacggtctggaaacggtatcagaatggtttcatcccttccatcgggctgcttctcacgcctcttccgggtgcgtaataatcgtaacgggatcgcccagataccggctgatacggggccataccgagcgccgccccgtctggccacgccatcctcttatgctctctctatccactctctccctcagcttctctcaaccacttccttacccatctttcaccctctcttcccctttccccctttcaaatctcttgaccttcaagtctggcgcgcgtctggacagcggctcttgtgctagaggtcttaactcctaccccgccttcctctggccttgaccttctctgttcctgaaccaggttccctcccggtcctctccgccgacgttatccccgacattgtgctgctcattacctccgcccccaaggtaacgggtaagcgaaaagtgcaaggcccagttggctaaatttcgatgactccttgagcgcgactccaagtccgcttgggaccgtttcctccgctccgtcttcggcaatatctactactactactattactattactaccccggtcagccgccgccgccgtattacaagtacccatcgcctactgatggtctccttatcattccgcggggagaccacttccattccctccatggcgtcctggttgctctcgacgctcctttttctgagcccgtccttggtgtcagccaaatcggccgcagactattatgttcactccttgcccggtgcccccgaggggcccttgctgaagatgcatgccgggtaagcttcgctgtcccggaacggtccgcttagcacctatatactgacttattgcctccacgcgcagccatattgaggtggatccacagaacaatggaaatcttttcttctggcactaccagaatcgccatattgccaaccgccagcggactgtgatctggttgaacggtggtcccggatgtagttccatggacggcgcgttgatggaggtcggtccgtatcgcctgaaggacaatgaaaccttgacctataatgagggttcctgggacgaattcgccaatttgttgttcgtcgatcagccagtcggaaccgggttcagttatgtcaacacggacagctatcttcatgagctcgatgagatgtcggctcagttcattgtctttctggaagagtggttcagattatttccggagtatgaacgcgatgatgtatgctgcaatcacctatgctgccctagtcctgcaccttcacggattctgttctaacatctgcgacagatctacattgccggcgagtcttacgccggtcagcatattccatacatcgccaaagccatccaggaacggaacaagaacgttcaagggaagaccatcgcttcgtggaatctaaaaggcctattgattggcaatggttggatttctcctaatgaacagtacatgtcctacttgccctacgcatatgaagaaggccttatcaaggaaggcagccggaccgcgaaggaactcgaagttttacagtcagtctgtaagtccaggctggaaactggcaagaacaaggtccacctcaacgactgcgagaaggtcatgaatgctctgttggataagacggtcgaagacaacaaatgtctcaacatgtatgacatccgccttcgtgacaccaccgatgcatgcggtatgaactggcccaccgacctggaggacgtgaagccctatctgcagcgggaagatgtggttaaagcgcttaacatcaatccggagaagaagtctggctgggtggagtgttcaggtgcagtgagcagcgctttcaatccgcaaaagtccccgccctcggttcaactacttcccggcttgctggaatcgggacttcaaatcctccttttcagcggagacaaggacctgatttgcaaccatgttggaacggaacagctcatcaataacatgaagtggaacggaggcacgggtttcgagacctcacctggcgtctgggctcctcgacacgactggagtttcgaaggcgagccggcgggtatctatcaatatgccagaaacctgacttacgtgctcatctacaacgcaagccatatggttccctacgaccttcctcgtcagagccgggacatgctagatcgcttcatgaatgtcgatatcgcgagcatcggaggcagccccgccgactcgcgcattgacggcgagaagctgccccagacgtcggtgggcggccatcccaacagcaccgcggcggaggagcaggagaaggagaggatcaaggagacggaatggaaagcctacgccaagtcaggcgaagccgttctcctcgtcgtcattatcggtgtattagtttggggcttcttcatctggcgcagccgccggcgtcaccagggataccggggcgtctggcataaggacatgagcggaagctctgttctcgagcggttccacaacaagcgcacgggaggcgcagacgtcgaagcgggggatttcgacgaggcggagctcgatgaccttcattctccagacctcgaaagagaacactacgccgtgggcgaggacagcgacgaggatgatatttcacgacagcattctcaacaggcctcccgagccgggggcagtcataatctatcctag

SEQ ID NO: 126 - DNA, 1839 bp, Aspergillus niger
  CDS (1)..(1839)
atggcgtcctggttgctctcgacgctcctttttctgagcccgtccttggtgtcagccaaatcggccgcagactattatgttcactccttgcccggtgcccccgaggggcccttgctgaagatgcatgccggccatattgaggtggatccacagaacaatggaaatcttttcttctggcactaccagaatcgccatattgccaaccgccagcggactgtgatctggttgaacggtggtcccggatgtagttccatggacggcgcgttgatggaggtcggtccgtatcgcctgaaggacaatgaaaccttgacctataatgagggttcctgggacgaattcgccaatttgttgttcgtcgatcagccagtcggaaccgggttcagttatgtcaacacggacagctatcttcatgagctcgatgagatgtcggctcagttcattgtctttctggaagagtggttcagattatttccggagtatgaacgcgatgatatctacattgccggcgagtcttacgccggtcagcatattccatacatcgccaaagccatccaggaacggaacaagaacgttcaagggaagaccatcgcttcgtggaatctaaaaggcctattgattggcaatggttggatttctcctaatgaacagtacatgtcctacttgccctacgcatatgaagaaggccttatcaaggaaggcagccggaccgcgaaggaactcgaagttttacagtcagtctgtaagtccaggctggaaactggcaagaacaaggtccacctcaacgactgcgagaaggtcatgaatgctctgttggataagacggtcgaagacaacaaatgtctcaacatgtatgacatccgccttcgtgacaccaccgatgcatgcggtatgaactggcccaccgacctggaggacgtgaagccctatctgcagcgggaagatgtggttaaagcgcttaacatcaatccggagaagaagtctggctgggtggagtgttcaggtgcagtgagcagcgctttcaatccgcaaaagtccccgccctcggttcaactacttcccggcttgctggaatcgggacttcaaatcctccttttcagcggagacaaggacctgatttgcaaccatgttggaacggaacagctcatcaataacatgaagtggaacggaggcacgggtttcgagacctcacctggcgtctgggctcctcgacacgactggagtttcgaaggcgagccggcgggtatctatcaatatgccagaaacctgacttacgtgctcatctacaacgcaagccatatggttccctacgaccttcctcgtcagagccgggacatgctagatcgcttcatgaatgtcgatatcgcgagcatcggaggcagccccgccgactcgcgcattgacggcgagaagctgccccagacgtcggtgggcggccatcccaacagcaccgcggcggaggagcaggagaaggagaggatcaaggagacggaatggaaagcctacgccaagtcaggcgaagccgttctcctcgtcgtcattatcggtgtattagtttggggcttcttcatctggcgcagccgccggcgtcaccagggataccggggcgtctggcataaggacatgagcggaagctctgttctcgagcggttccacaacaagcgcacgggaggcgcagacgtcgaagcgggggatttcgacgaggcggagctcgatgaccttcattctccagacctcgaaagagaacactacgccgtgggcgaggacagcgacgaggatgatatttcacgacagcattctcaacaggcctcccgagccgggggcagtcataatctatcctag

SEQ ID NO: 127 - protein, 612 aa, Aspergillus niger
MASWLLSTLLFLSPSLVSAKSAADYYVHSLPGAPEGPLLKMHAGHIEVDPQNNGNLFFWHYQNRHIANRQRTVIWLNGGPGCSSMDGALMEVGPYRLKDNETLTYNEGSWDEFANLLFVDQPVGTGFSYVNTDSYLHELDEMSAQFIVFLEEWFRLFPEYERDDIYIAGESYAGQHIPYIAKAIQERNKNVQGKTIASWNLKGLLIGNGWISPNEQYMSYLPYAYEEGLIKEGSRTAKELEVLQSVCKSRLETGKNKVHLNDCEKVMNALLDKTVEDNKCLNMYDIRLRDTTDACGMNWPTDLEDVKPYLQREDVVKALNINPEKKSGWVECSGAVSSAFNPQKSPPSVQLLPGLLESGLQILLFSGDKDLICNHVGTEQLINNMKWNGGTGFETSPGVWAPRHDWSFEGEPAGIYQYARNLTYVLIYNASHMVPYDLPRQSRDMLDRFMNVDIASIGGSPADSRIDGEKLPQTSVGGHPNSTAAEEQEKERIKETEWKAYAKSGEAVLLVVIIGVLVWGFFIWRSRRRHQGYRGVWHKDMSGSSVLERFHNKRTGGADVEAGDFDEAELDDLHSPDLEREHYAVGEDSDEDDISRQHSQQASRAGGSHNLS

SEQ ID NO: 128 - DNA, 2936 bp, Aspergillus niger
gagctgagctggtccaaggccttggaaatcattccgggggtatagactcgcttcgtcgtaggatcaacaagccgtcctgatacgatatccaacacctccttctccacgcgctcgatgatttccttgcgctcacgctcgccaacttgcacttcaccctttcgtagaatttcttgccggatctcatctgcaggcgtgtcggcgccgaaggcctttgttaactcggcggatggggctgtttgcgctttggaaaccgacaggaagatcgtggggacttggaggacattgtcgagatccttctctgctccggagcggtactcgaggagtttgttcttgtagcaggcgagttcgaagcgctttttacctgttggtgaaacggttagcggggttgcggggccgactggaagtttcgcaggcagtttttctttctacgctgaatttgcgcatgatctccccacattattgacagacatgccacgcaagacgatcgcaaatgaagggccacacatgcatatcaatacgtacccttttttagcctgacgactgatacgttggtaaatttaatctgatttgatggttggttgatgggcatgttgctggaagcctctgcgacaaagcaagaggctcttgtgtatacacagagtcaattcaggtaatatatggaatcggtatactcgcaggtgcgtcagtgaggaggattatgtttcgaatgcgctgaaaaaaatgctgttgatagcctaaggtagtcacccgacgggcttgtgattggaggaaaccgcaatgacgctggtcccgtgccatgagctgactcagctggctgactcaacgcgtgactttctgcaaagggaaggcaccggcatgtgattggtcgccttccgttcctgctatcgaggcgtcatcgcctacagcccatcgagtacacctcctcttctctcctctctccttccttccttcctctccatcctcttctgggtttccattgatcacccagtagctggtattttctgagctacttgctttttctattttgatacttttgtgtccgtaagttcactttatgccctctgaccccccccttgataacccgtgctgataagctccctgcccaggtaccgtaccttccagaccgcaaggtacccatcctctgcctactcatcccatcaccatctcaattcataccggccccgtagggtttcagcaacaatgagagtccttccagctgctatgctggttggagcggccacggcggccgttcctcccttccagcaggtccttggaggtaacggtgccaagcacggtgccgaccatgcggccgaggtccctgcggatcacagtgccgacgggttctccaagccgctgcacgcattccaggaggaactgaagtctctctctgacgaggctcgtaagctttgggatgaggtggccagcttcttcccggagagcatggatcagaaccctctcttttccctccccaagaagcacaaccgccgtcccgactcgcactgggaccacatcgtccgcggctccgacgttcagagcgtctgggtcactggtgagaacggtgagaaggagcgcgaggtcgatggcaagctggaagcctatgatctcagggtcaagaagaccgatcctggctctcttggcatcgaccccggcgtgaagcagtacaccggttatctcgatgacaacgagaatgataagcatttgttctactgtaagcacaccttggttcaagatcacgctttttatatgctctggatatctaacgcaacttagggttcttcgagtctcgcaatgaccccgagaatgatcccgttgttctgtggctgaacggtggccctgggtgctcttccctcaccggtctcttcatggagcttggccctagcagcatcaacaagaagatccagccggtctacaatgactacgcttggaactccaacgcgtccgtgatcttccttgaccagcctgtcaatgtcggttactcctacagtaactctgctgtcagcgacacggtcgctgctggcaaggacgtctatgccttgcttaccctcttcttcaaacaattccccgagtatgctaagcaggacttccacattgccggtgaatcttatgctggtcactatatccccgtcttcgcttcggagatcctgtctcacaagaagcgcaacatcaacctgcagtccgttctcattggcaacggtctcaccgacggatacacccagtacgagtactaccgtcccatggcctgcggtgacggcggttacccagctgtcttggacgagagctcctgccagtccatggacaacgctcttcctcgctgccagtctatgattgagtcttgctacagttccgagagcgcttgggtttgtgtcccggcctccatctactgtaacaacgccctccttgccccttaccagcgcactgggcagaacgtctatgatgtccgtggtaagtgcgaggatagctctaacctttgctactcggctatgggctacgtcagcgactacctgaacaagcccgaagtcatcgaggctgttggcgctgaggtcaacggctacgactcgtgcaactttgacatcaaccgcaacttcctcttccacggtgactggatgaagccctaccaccgcctcgttccgggactcctggagcagatccctgtcttgatctatgccggtgatgctgatttcatttgcaactggctgggcaacaaggcctggactgaagccctggagtggcccggacaggctgaatatgcctccgctgagctggaggatctggtcattgtcgacaatgagcacacgggcaagaagattggccaggttaagtcccatggcaacttcaccttcatgcgtctctatggtggtggccacatggtcccgatggaccagcccgagtcgagtctcgagttcttcaaccgctggttgggaggtgaatggttctaa

SEQ ID NO: 129 - DNA, 1674 bp, Aspergillus niger
  CDS (1)..(1674)
atgagagtccttccagctgctatgctggttggagcggccacggcggccgttcctcccttccagcaggtccttggaggtaacggtgccaagcacggtgccgaccatgcggccgaggtccctgcggatcacagtgccgacgggttctccaagccgctgcacgcattccaggaggaactgaagtctctctctgacgaggctcgtaagctttgggatgaggtggccagcttcttcccggagagcatggatcagaaccctctcttttccctccccaagaagcacaaccgccgtcccgactcgcactgggaccacatcgtccgcggctccgacgttcagagcgtctgggtcactggtgagaacggtgagaaggagcgcgaggtcgatggcaagctggaagcctatgatctcagggtcaagaagaccgatcctggctctcttggcatcgaccccggcgtgaagcagtacaccggttatctcgatgacaacgagaatgataagcatttgttctactggttcttcgagtctcgcaatgaccccgagaatgatcccgttgttctgtggctgaacggtggccctgggtgctcttccctcaccggtctcttcatggagcttggccctagcagcatcaacaagaagatccagccggtctacaatgactacgcttggaactccaacgcgtccgtgatcttccttgaccagcctgtcaatgtcggttactcctacagtaactctgctgtcagcgacacggtcgctgctggcaaggacgtctatgccttgcttaccctcttcttcaaacaattccccgagtatgctaagcaggacttccacattgccggtgaatcttatgctggtcactatatccccgtcttcgcttcggagatcctgtctcacaagaagcgcaacatcaacctgcagtccgttctcattggcaacggtctcaccgacggatacacccagtacgagtactaccgtcccatggcctgcggtgacggcggttacccagctgtcttggacgagagctcctgccagtccatggacaacgctcttcctcgctgccagtctatgattgagtcttgctacagttccgagagcgcttgggtttgtgtcccggcctccatctactgtaacaacgccctccttgccccttaccagcgcactgggcagaacgtctatgatgtccgtggtaagtgcgaggatagctctaacctttgctactcggctatgggctacgtcagcgactacctgaacaagcccgaagtcatcgaggctgttggcgctgaggtcaacggctacgactcgtgcaactttgacatcaaccgcaacttcctcttccacggtgactggatgaagccctaccaccgcctcgttccgggactcctggagcagatccctgtcttgatctatgccggtgatgctgatttcatttgcaactggctgggcaacaaggcctggactgaagccctggagtggcccggacaggctgaatatgcctccgctgagctggaggatctggtcattgtcgacaatgagcacacgggcaagaagattggccaggttaagtcccatggcaacttcaccttcatgcgtctctatggtggtggccacatggtcccgatggaccagcccgagtcgagtctcgagttcttcaaccgctggttgggaggtgaatggttctaa

SEQ ID NO: 130 - protein, 557 aa, Aspergillus niger
MRVLPAAMLVGAATAAVPPFQQVLGGNGAKHGADHAAEVPADHSADGFSKPLHAFQEELKSLSDEARKLWDEVASFFPESMDQNPLFSLPKKHNRRPDSHWDHIVRGSDVQSVWVTGENGEKEREVDGKLEAYDLRVKKTDPGSLGIDPGVKQYTGYLDDNENDKHLFYWFFESRNDPENDPVVLWLNGGPGCSSLTGLFMELGPSSINKKIQPVYNDYAWNSNASVIFLDQPVNVGYSYSNSAVSDTVAAGKDVYALLTLFFKQFPEYAKQDFHIAGESYAGHYIPVFASEILSHKKRNINLQSVLIGNGLTDGYTQYEYYRPMACGDGGYPAVLDESSCQSMDNALPRCQSMIESCYSSESAWVCVPASIYCNNALLAPYQRTGQNVYDVRGKCEDSSNLCYSAMGYVSDYLNKPEVIEAVGAEVNGYDSCNFDINRNFLFHGDWMKPYHRLVPGLLEQIPVLIYAGDADFICNWLGNKAWTEALEWPGQAEYASAELEDLVIVDNEHTGKKIGQVKSHGNFTFMRLYGGGHMVPMDQPESSLEFFNRWLGGEWF

SEQ ID NO: 131 - DNA, 32 bp, Artificial Sequence
  synthetic primer for polymerase chain reaction
tctcctgaggcccgatcggaccctgcgcgatc

SEQ ID NO: 132 - DNA, 32 bp, Artificial Sequence
  synthetic primer for polymerase chain reaction
gatcgcgcagggtccgatcgggcctcaggaga

SEQ ID NO: 133 - DNA, 31 bp, Artificial Sequence
  synthetic primer for polymerase chain reaction
gcgtctcctgaggccagacggaccctgcgcg

SEQ ID NO: 134 - DNA, 31 bp, Artificial Sequence
  synthetic primer for polymerase chain reaction
cgcgcagggtccgtctggcctcaggagacgc

SEQ ID NO: 135 - DNA, 35 bp, Artificial Sequence
  synthetic primer for polymerase chain reaction
ctaacgtatggcgtctccagaggcccgacggaccc

SEQ ID NO: 136 - DNA, 35 bp, Artificial Sequence
  synthetic primer for polymerase chain reaction
gggtccgtcgggcctctggagacgccatacgttag

SEQ ID NO: 137 - DNA, 32 bp, Artificial Sequence
  synthetic primer for polymerase chain reaction
ctgcgcgatcggcggtagagcgcaatctaagg

SEQ ID NO: 138 - DNA, 32 bp, Artificial Sequence
  synthetic primer for polymerase chain reaction
ccttagattgcgctctaccgccgatcgcgcag

SEQ ID NO: 139 - DNA, 1002 bp, Aspergillus niger
gcttttggcttgtgatcttgattgctagagatgtatatcctcacggataccgccggagtgcgccatttctggttaccttctctttccctttttgtctcgatcgtgaggcggaacgcaggatgaagacacggcttctccatcgcggcccaccaaccaacaatgtccttggacgcccaactctccatctactggtcattggtccaatgcagagactccgtcgagctcaaatgggccggccaaccccgagtcgtcaggggcagcggcagcgacgagctaaattagaccactgataagacgcgatagtccaaagtctgaccgtcacattgtgccaggcagataagttgaatcgtgtgactggatgttggctaacgtatggcgtctcctgaggcccgatcggaccctgcgcgatcggcggtggagcgcaatctaaggacatccgcgcctaagatatctacccttcagcagttcagcctagccctgcagacttgtcggaccagtgctatcgtgatcggcccccacggtcgaatgagctcttgtctctttccgtcagaccctgccagttaatctgctatctactccgcggtaacatcgtgcctgtctccactaaggcagggtccagggctgtatgtcttactttgcaccgagtcggccgccggttggctctgtcttggcaattgcgaatatcctcacgggcgacggacgacacggatttggacggacatgcggagatcttcgtcggtttattcctggaagggacatcatctccttccatcatgacggctgccatagcggggactctgagacatttttgctctgaagagcatggtcgacttggatgatggaggagttgatcgaggtcaatgaggagaggcttgcaagtataagaagagactgctcgaccagcagaatggatcttcttgttcatcaaccaagagtccaaggcttctttgtctggttctatctcttctccgaactctcttgcttgacattctcgtggtcaaa

1. An isolated polynucleotide comprising a double-stranded DNA binding site for a PrtT transcriptional activator, wherein at least 32 bases of a first strand of the site are identical in sequence to 5′-G/C(N)₅ C C G A/T C G G (N)₁₉ G/C-3′ (SEQ ID NO:22), a second strand of the site is complementary to the first strand, and binding of PrtT to the site will activate transcription of a downstream nucleotide sequence in a host cell.

2. An isolated polynucleotide comprising a double-stranded mutated, non-functional DNA binding site, wherein at least 32 bases of a first strand of a non-mutated site are identical in sequence to 5′-G/C(N)₅ C C G A/T C G G (N)₁₉ G/C-3′ (SEQ ID NO:22), a second strand of the mutated, non-functional site is complementary to the first strand, the non-mutated site is bound by a PrtT transcriptional activator and binding of PrtT to the non-mutated site will activate transcription of a downstream nucleotide sequence in a host cell, but at least one base of a first strand of the mutated, non-functional site is changed as compared to the nucleotide sequence of the non-mutated site such that PrtT no longer binds to the mutated, non-functional site or that PrtT no longer activates transcription of a downstream nucleotide sequence.

3. An isolated polynucleotide comprising a double-stranded mutated, enhanced DNA binding site, wherein at least 32 bases of a first strand of a non-mutated site are identical in sequence to 5′-G/C(N)₅ C C G A/T C G G (N)₁₉ G/C-3′ (SEQ ID NO:22), a second strand of the mutated, enhanced site is complementary to the first strand, the non-mutated and mutated, enhanced sites are bound by a PrtT transcriptional activator and binding of PrtT to either the non-mutated or the mutated, enhanced site will activate transcription of a downstream nucleotide sequence in a host cell, but at least one base of a first strand of the mutated, enhanced site is changed as compared to the nucleotide sequence of the non-mutated site such that transcription of a downstream nucleotide sequence is enhanced.

4. A recombinant expression vector comprising the DNA binding site of claim 1 in a promoter, a transcriptional stop signal, and a translational stop signal.

5. The vector of claim 4 further comprising a downstream nucleotide sequence which encodes a polypeptide, wherein transcription of the downstream nucleotide sequence is activated by PrtT.

6. A host cell comprising the polynucleotide of claim 2.

7. A method of identifying a protease, wherein expression of the protease is regulated by a PrtT transcriptional activator, said method comprising:
(a) detecting differentially expressed genes in (i) fungal cells and (ii) fungal cells with a genetic deletion of the transcriptional activator (delta prtT), and
(b) identifying a differentially expressed gene that encodes a protease as a protease gene.

8. An isolated protease identified by the method of claim 7.

9. An isolated polynucleotide encoding the protease of claim 8.

10. A host cell, wherein at least one DNA binding site in the host cell's genome is mutated in accordance with claim 2 such that PrtT can not bind to the mutated site or that PrtT can not activate transcription of a downstream nucleotide sequence.

11. A method of producing the host cell of claim 10, said method comprising:
(a) introducing the at least one mutated, non-functional DNA binding site into a promoter of the host cell by mutagenesis or recombination, and
(b) optionally confirming reduced binding by PrtT to the mutated, non-functional site or reduced PrtT-dependent transcriptional activation in the host cell.

12. A host cell, wherein a DNA binding site in one or more of the host cell's protease gene(s) is mutated in accordance with claim 2 such that PrtT can not bind to the mutated site or that PrtT can not activate transcription of the protease gene, which results in a host cell with a reduced protease phenotype.

13. A method of producing a polypeptide, said method comprising:
(a) cultivating the host cell of claim 12 in a nutrient medium, under conditions conducive to expression of the polypeptide,
(b) expressing the polypeptide in the host cell, and
(c) optionally recovering the polypeptide from the nutrient medium or from the host cell.

14. A method of producing a polypeptide, said method comprising:
(a) transforming the host cell of claim 12 with an expression vector, wherein the vector expresses the polypeptide,
(b) cultivating the host cell in a nutrient medium, under conditions conducive to expression of the polypeptide,
(c) expressing the polypeptide in the host cell, and
(d) optionally recovering the polypeptide from the nutrient medium or from the host cell.

15. A method of producing a polypeptide, said method comprising:
(a) cultivating, in a nutrient medium, a host cell comprising the vector of claim 5, under conditions conducive to expression of the polypeptide encoded by the downstream nucleotide sequence comprised in said vector,
(b) expressing the polypeptide in the host cell, and
optionally recovering the polypeptide from the nutrient medium or from the host cell.

16. A host cell comprising the polynucleotide of claim 3.

17. A host cell comprising the expression vector of claim 5.

18. A recombinant expression vector comprising the DNA binding site of claim 3 in a promoter, a transcriptional stop signal, and a translational stop signal.

19. The vector of claim 18 further comprising a downstream nucleotide sequence which encodes a polypeptide, wherein transcription of the downstream nucleotide sequence is activated by PrtT.

20. A host cell comprising the polynucleotide of claim 19.
